United States Patent Application Publication US 2024/0226191 A1 - sequence listing, part 2

SEQ ID NO: 25 - DNA, 3086725 bp, Mediterraneibacter faecis (residues 1,543,364-3,086,725 of 3,086,725)
aaatggcttcatgatataatcatccgctccgagttccagtccgagaactttgtcaaatacttcacttttggcagaaagcatgataatcggtgtggcagctttggaacgaatctcacgacaaacctgatacccgtcaattcccggaagcatcagatcaagaagaatcagatttggttgatagctgtcaaaagctgcaagcgcatcttctccatcatatactaattttgtatcaaaacattcttttgtgagataaagagaaatcagttcagcgatattctcatcatcatctacgattaggattttctgttttccaaacattctttttcccccattaaccatgataaggtagttggtaactgtttaaaataattagccaagttctacaattgttacacctgcgtcaccttcaccaaattcggcaaggtgataggattttacatgtttctgacgacgcagatattcatgaattccctttctgagtgctccggttccctttccgtgaactacacggacagtattcaggtgagcgaggattgcgtcatccaggtatttatccagctcagcaacggcttcatcaacagtacgtccgagcagattgatctcaggccggacagaaagagattttcccattttgattttgccttttgaagtacggttcattttcttcggtgcatatggagagacttcctcgataatctccagatcagaaatgttgacctgggaactgaggattcccatacgtacggtaagattccctttggcatcaggtagagagcttacggttcctgtcaggttcatgctgagaactttgacagattctccgagcttgaagtcagatgctttatgctctttctttggtttctgtgctttcattgcagacgcagatgctgtatctttgatcttcttacgcagcttctcgcgttccttttccatctcggcagcagaaatgttttccttgccgaatttacggaaatccttgatcgtcttgtctgcaatttcttttgcttcacgcagaatggcgtttgctttttcatttgcctcgcgtaaaatgcggtcgcgctgatcatctaatttctcctggcgctgtttcgcctgggctttcaggtcttccgcttctttcttcaatcgtgcgatttcttcctgttccttttcaatcgtccgtttgcttgtctcaagatcagtaagaagatcttcaaaggaaacgtcctgttcactgagccgtttctttgcatcttcaataatataatccggcagacctaatttcccggagattgcaaatgcattacttttaccaggaataccgatcagcagacggtaagtcggacgaagactttctacatcgaattcacaacaggcattctccacacccggagtggaaagtgcatagacttttaactcgctgtagtgtgtggtagccattgtacggattcctctctggtgaagatgggacagaatagaaattgcaagtgcggcaccttccgtcggatctgtaccggctccaagttcatcaaagagaaccagcgaacgttcatctactttcttaaggaaagagacaatattggtcatatgagaagagaatgtactaaggctctgctcaatactctgttcatctccgatatctgcataaatctgatgaaatacagccagttcactgcggtctccggcaggaatgtgaagtccggactgtcccatcagacagaacaagccgaccgttttcaaagaaacagttttaccgccggtgtttggtccggtgatgatcagcagtgtgaagtcttccccaagtgtcacggtgatcggaacaacttttttcggatcgagcagtgggtgacgtccctcgcggatacggatgcgtccctcttcattcagaagcggccggctggcgcgcatggacattgccagagcacctcgtgcaaaaatgaagtcaagatccgtcagagaacggtaatccacacggatttcctcgatatattgtgcggcttcttcacttagattcgcaagaatcacctgaatctcttcctgctcctttgcataaagttcttttaagtcattgttcagttttacgattgccataggttcaataaaaagagtagaacctgttgaagactgatcgtgaatgagtccctgtacctgtccacgatattccgctttaacaggtacacaatagcggtctccacgcatggtaatgattgcatcctgcagataagtgcgaagggaaccgttgaccagtgtagttaaagtggcgtgtactttgtcattgatgttattaatgcttcgacgaatttgcttcagtgtggaactggcatcatcactgtattcatcttcgccgataatacagcggtcgatttcatttgaaagtggtgtcagtggttcaagcaggttaaaatattcatccaggcagtcgcaagcgtcctcttgtgtatcatgtcttccgtaggcctttaccctggctgcatttacaagcaggcgggaaatacggagaagttctgtgctgctgagtgagccaccaatctccagacgcttcatggactcttcaaccggtgcagcgtcaccaaacgagatacgtcccttttgcacgattcgtgtataagcggcagcagtctgttcctgataagtgttgatcttatgcaggtcggtcattggcttcaaacgacggcagagctgtcctccgcgaaaagatgtcgcttctttttcaagaagagcaatgatcttatcatattccagtttaaataatgttttttgattcatttattttcctctgtcatttcaacttaatactaattttttaatcatgtagctgttcacaatacatgtgaacaataactatttccgagtcttattgtaccttattatttcattaaataaaaggcttttatagatattgaacaatctatatgaatcagttatactaagtaatggaaatgtccgtgtcggttgattttgtagttgacacggaagtgaacagtcacgaatgaggttcatgtcaatgtcagaaaagaaaagtaatggtcaggttccggaagagggtcctgacgggaaaaatttagaacagtcagaaaaaaaggaatcttttgcatttctcgaagagacgataaaaccaaagaagatcagcagacagcaaggaatgaaacagctcatccggattgcaatatgcggactggttttaggaggctctgcgtgcctgggattctttgcattgcgcccgcttgcacagcatttatttcctgaaaagacacaagttgtgacaatccaggaggacaatcaatcagaggaagatttagcagaaggtgacgacacgacagagcagaatgacgcgcagaatcagcaggagatcagttatgtacagatgatgtccaaagcatatgagaaagcactgacagcgaagaagagtgtggtatctgttacgaaaggagcagaacaggagaactggaatgcagaagcgaccggaattgatgagagcgtatctggtgtgatcgttgcagataacggaccggagatactgattttgtcctatgcttcgatctgcgaagatgcaaaagagtggtgcgttacattttcagataaatcagaatataaggcaagcttgaaaaagcaggataaaaatagtggatttgcaatatttgcggtagataaaaaaagcctttcagatgccacatggagtgcttcaagtgtagcatcacttggcaattcgaatctgacagaacagggtgacgttatattcgcactgggaaatattttcggttatgccggaggaagcggatacggaattgtcagttcgtcaaactataaagaaatcggacgcgacggagagtatagtgtgattgcgactgatatgagcagtgcatccgaaggaacgggtattttattcaatctggatggagaagtgatcggaatgatttcttctgatatctggaaagaccggggagtacgcaccgcaaatgcttatgcgatttcagatctgaagttggttatccagctgttagcgaacggtgcaagtgtaccatatatcggtgtgtcaggaacagcagtgacaagtggaattcaggaagaagagggcatgccgtcaggaatctatgtgattgacgtggcagcagattcacctgcaatggcagcgggcatacagagtggagatgtgatctgttctgtgaatggagagaaaattgtaagcatgagtgcttaccgtaaactgatgctgacatggaaagtaggagatcagatcaaagtggaagggaaacgccgaggatctgaaggatatgtagatattaaatttgatattacgattgaaagtaaagaataacaagtgaaagaggcagaaaatgagatttatagatggattatgcgagggagaaacaatcaggaatgtatatctttgtaaaggaaaacgttccgcagagacaagaaatggaaagccgtatgataatctgattcttcaggataaaacaggaacattagatggaaaagtatgggatccaaactcccagggaatcgcagattatgatgagaaggactttatcgaagtttttggagatgtgatcaattataatggaaatcttcagttgaacatccgtcagatcagaaaggcggaagagggagaatacaatccggcagactatatgccgacaacagataagagtgtagacggaatgtacgaggaactgacagcttatattcgtcagatctctaacaaatatttaagacaggtgttggaattctactatataaaagatgaagcatttatcaaaaaattcaaggcacattccgcagcgaagacagtacatcacggattttccggaggattgcttgagcatacactcagtgtaactcgtatgtgtgattattttgcaacaagctactctattttgaatagagatctgctccttagctctgcaatccttcatgatatcggaaaagtgaaagaactttctgattttccggacaatgattatacagatgagggacagctgatcggacatatcgtgatcggtgtcgagatgatcgatgatgcgatccgttctatcccggactttccggtgaagcttgctcatgaactcaagcattgtatcgtggcacatcacggtgaactggaatacggttctccaaagaaaccggcactggcagaggcagtggcactgaatatggcagattcaacagatgcaaagcttcagacattgacagaactgttcaaaggaaaaacaggaacagaatggcttggatataaccgtttgtttgagtctaatttaagaagagcatccgaggattaaatctaacaatgagaacaacaaatgtcactgtttgcagaatctatgtgagcagtggctatttgtatgatacaagggtcaaaaggtcatgcgtttcttgcttgcatgaaaaagcatgacttattgacccgcaaaacaccgaaaagtagccatttttcgtagaaaaatgagcggatttgaggtgttttaggattgcgagagcatgaaatgcgaagcaatccgtgtatcataggggtcaaaataccttttgaccccaacatctttgtataattaagagtaaaatagaagagagaaaagaatgaacaagaatgatattgtaacagttgaaataacagatatcggagtgagcggggaaggaattggccatgtggatggctacacgctctttatcaaagacgcagtgatcggtgatgtggttgaagcgaaagtcatgaaggcaaagaagaattatggctatgccagattgatgaaagttatcacaccgtcagaatatcgcgtagaaccaaagtgtgcatttgccagaagatgcggaggctgccagatccaggaaatgtcttatgatcgtcagcttgtgtttaaggatcagaagattcgtggcaatctggaacgaatcggtgggttcacaaaagaccagattgatacagtgatgcagccggttgttggaatggagcatccgtttggttatcgtaataaagcacagttcccgttcggaacggacaaagaaggcaatccgatcacgggattctatgccggaagaacacatgatatcattgcaaacacagattgcgctcttggcgtagagcagaacaaagagattcttgagattattttacaatatatgcgtgaaaacaagatcaaatcgtatgacgagaagactggaaaaggtctgatccggcatgcattgattcgctatggattcaagacaaaagaaattatggtctgtcttgtgatcaacggaaagaaacttccgaaagcagagcgtctgattgaaaatcttattcagattgagggcatgacaagtatcacgatcagtccgaatacacgaagagataatgtgattatgggagattcttatgaaattctctggggacagggatatattacagattatatcggaaatgtaaaatatcagatttccccattatcattctatcaggtaaatccggtacaaacagagaaactatacggacttgcacttgagtatgcagacctcaaaggtgatgaaaccgtgtgggatctgtactgcggaatcggaacgatttccctcttccttgctcagaaggcaaaacaggtttacggagttgagattgtgccgcaggcaatcgatgatgccaaagaaaatgcaaagattaatgcgattgataacgcagaatttttcgttgggaaggcagaagaagttctgccggaatattatgcagagtatgagcgagagcataatggcgagacagctcatgcagacgtgatcgttgtggatccaccgagaaagggctgtgacgagacactgctggagacgatcgtgaagatgcagccggagaaggttgtgtatgtaagctgtgacagtgcgacattggcgagagacctgaagtatctgtgtgcgaatggatacgagatcaagatgtgtagaggtgtggatcagttcccgcagagtgtgcatgtggagacatgtgttttattgtccaaactaggacaatagttggatgattcgatgactggaaagtgaagaattattatataagtcaacgaatactaggaagcagatgactagaatttgaagaattgctatatgagtcaacgaatgcaatgtattcgtaatatggcagaagagattgtgttaaatgaattgatttacaggtgaacaaagagctgaacaggtaggaagaaaaatcctatttgttcagctttggtgtttataagggggcaaagaagaagcatattacaattctactgctagtcgattgatttatgcatattcccattataatatgtgtgcaggaggtgaatatatgtatcaaattagtaatgaaaaattcggtttatttgtaaccgaattaagaaaggaaaagaatttaactcaaaaggatttggctgaaaaattatatgtatcagataaaacagttagcaaatgggaacgtggtcttagtatgcccaatgtcgtattactcataccaatagctgatatattagaggttaccgttacagaattgttacgtggagaaaaaatagatacacagaaaaatattgatagaaaagaaatcgaggaattggtagtaggttctctcgatatggctgttagggattctattcatcaacatagaaaaaactggatattagcatatttgttatgcctttttatatctattacagaaattattatcttagttgtatctggaagttcattagctgagatgaaaggggatatattgctggttacagggttaatgcttttatttggtgcatggttttgtttctttgccaaagacatgttaccaacatattatgatgccaacaagataaattatgtttcacaaggaatttttagaatacatctagtgggtttatcctttaacaatggaaattggatgtacatctgcacaactttaaaaatatggacacttgcaacggttgttttatatcctcttgtaggtattataataatcaattgcttcaatatagctttatggaatattttgaataaaattttcttaattatgatattaggtggtatggtagtttcgatttacattatcgggaaaaaatacgaataattaaattacctgttatcgttgtggatagtactaatttacaacattcttcatgggaaatatggaatgcagcagaagagattgtattaagagaattactgtatatttaaagcatggaaagctcctttgggagctttttgctggttatcaagaaagtatatagaaaatgcattaatcatatggtatgatttgaacagaagatagaattttatgaagtaagaagaatgttttggagaaatgtaacttagaagttacagaattaagttaatcgtgccatatggcttgattataaaagcaaagataaaaacgcaacgtacatctttggtgtgccagagccggtaggtagcccggccgtcctatataaatagggtaagtaacctgcccctccgggttgtccattctttgttcaatcaattttaggagggattcttatggacaaagtaaatggaaagctgacagtattttttgaagagccgttttgggtgggaatctttgaacgcatcgaagatggtaagctatctgtggcaaaggtaacatttggtgcagagccaaaagattgtgaagtgcaggaatatattcaaaagtggtacttcagtttgaaattcagtccggttgttgaaaatgttgtaaaggatatcaaaagaaatccgaaacggatgcagcgggaagtaaagaagcagatgctggaaataggcattggtacaaaatcgcaacaggcgttgaaattacagcaggaacagaacaagcaggaacgcaaagagaaaagccgcaagagaaaagaggcagaagagcagcgaatgtttgaactgaaacagcgaaagaaaagagaaaagcataagggacattaaagtcccttgggcttttactcaaatcgaaaagtgttgaataaagctttcggaaggtgcttctatgaagaaaaaagtacttgcaattatgttagttgccgtgtaaataatgttgatttcgacgtgtggaaaaaaagaaaaactgtacgaaattcctgatctatcgcagtataagacagattatgtaggagattcttcgaatgttataaatattgtaaacggtcaagagtatccggagggatactcatatgacagtatagagatacagtctgaaacagagccttatggattaacagtttttctaaaagatgagccgtctgcagtcaaacttgaagatgaattgcaggttaatgcagatatgacatttgatttgattggtaatttgggaacaattgattataaaacagcggatagcaaagaaattattgcatcgtatgaacggtgatatatttttagtcaacttttagacaatttgaagagcggaatataaaaaggcgtatggaagttttaaatccatacgccttttttgaaaaactcatttttgaacaagagatttgtaagaacatattatctattcaaagacggttataattccatatcatgtgactttttcttagtccgagcaggctgatttcgccgtattttatacaaaaaacaaagagaaaaggtattgagggaaaattgagctaaaattgaataaaaaattaattaaaatactaactttttctacggtaggattgttatattatgtagaaaacgaaggggagaataagtgaatgaagtataaaatggattctttgttagtacatctagcaagagcaggagatgaagatgcgtgtgaaaaactggtcaaaaaatattacccaagtatatatcaatattgtttgctacatatcaatgatccctatgaggcagaggatttgacacaagaagtgtttacacgtttcttttccaatttatatagatataaagaatatggaaaagttaagaattatctttatacaattgccggaaataccgttaaaaattattacaaaaagaaaaaagatattccatcagaggaactgctaaaatcagaggactgtagtaaaaatcatgtagaagagctaggagtccgattaactattgaacaggcagtgagaaagttaccggaagaaattagagaaacggcagttttatatttttttcaagaattgaaacaaagagaaattgcagaattacttcacataaaactttcgcttgtaaaatatcgaattggaagagcaaaagaacttttgatgaaagagttggaggtgaaaaactatgatgaaatataagcaacaaataaaggaatataaagaggagattgaaaaaaaatatgtaaggattgaagcagaaaacagaacagtaaaagcatgtcagaatattttgtcagagtcaattttatcgaaacaatcgcatagaacatcttattttgaatttttgtatgagcagacaaaattcataaaaaaaagatggtggattttacaaggttgtattcttatgtgtctatggatattgttgagtaattatacgtcagacataaaagatatgatgaggattatgggaatatctgccacaatatttgtggttctgattgtcccggaaatttggaaaaacagaagaaatggtgcgattgaaattgagcaggcgtcttattacacactgcgtcagatttgtacagcaagaatgttaatgtttggagtagtggatctggtgatcgttatggtgtttttggcaattacatatcaaacaacaatactctcgttaagtgatttggtggttaattttttgcttccagtaaatgtttcatgttgtatatgttttcgtgtattgtacagcagatgggaaaaatcagaatatatagcagtgctttcctgtctggtatgggttggtttatggatgatgattgttgcaaatgatgttatttatcagaaaattgtaactccggtatgggtggctatgctgatattgacttttgtatattttgttttttgtgttcagaagtcattggtatttgatgaaaaaattttggaggattacacgtatgaaattagaatttaaaaatgtaacaaaacaatacggagaagtaaatgctgttaataaagtaaattgtgttatggaaaaaggaatttatggactgcttggagtaaatggagcaggaaagaccacattaatgcgtatgctttgtacgattgttcaaccatcagaaggacaaatattatggaatggtaaagatatatggaaactaggaggtgaataccgagaagttctgggatatttaccacaggattttggatattatccagatttgaccgtatatgattatatgatgtacatttcttctataaaagggttaaaaatgccgtttgccagaaaaaaagtgaagcaattattaaatcaagtaggaatggaaaaattcagtaaaagaaaaatgaagaatttgtctggaggaatggttagacgtgtaggaatagcacaggcgatgttaaacgatccgcaaattcttgtcctggacgaacctaccgccggattagacccgaatgaaagaatacgttttcgtaatttaattagtgaattgtcggaagaacgtttggtgctcttgtctacacatattgtatcggatattgagtacattgcgaataacattatgttaatgaaagatggagaacttttttatgcaggtactgcagaagatttagtatcttctatgaaagaaaaggtatggcaatgtaatgtttcgagaagtatgatagacaaatatatgaatgaatatttggttggaaatataaaaacaacaaaaaccggagcagagcttagaattatttcaatagaaaagccaacagaagatgctgtggctgtagaaaaaaatctggaagatgcatttctattttattttggagaaaaatcggaggaaaaacaagatgcttaaattagaattaaaacgaattttttcaaagaaaattaatgtatttgcaatcggattggcattgatacttgctgtcatttttagcggatttgcagttacaagtaatcgctatgtggatgagaatggaaatgctagtactggaattatggcaacaagaaaacttacagataacagacgagcatggaaaggtacattgacagaagatgaacttggaaaagttatagaacaaaataaaaatgcggtgacacaatcctcagaagaagaaaatgcgatttacggaacgacattacaaccgatagatgatattaggagttttataatatcggtattaacaccggatgcagaatatgatgaaagtgttctgaatcaaattacagaagaaaatatacaagagttctatgacacttatcataaaaatatggaaaagatggcagaagaatatggaaagacttctgttcagaaaaaatacttggaaaagaaatataataaaataaaattaccagtagaatacgaatcttatagttcatgggatactatgattatgtatgtagaaacgtattctattattctggcaatcatagttggttttatttgtgctggaatatttgcagatgattttcagacaaaagcagatgcagtatttttctctacaaagtatggacgtacaaaagctgttaaaacaaaaatactggcaggaatagttacgacagttatgatttattgtatgggaattatattacttagtgtgatttgttttggaattatgggaaccagcggtatgaatacaccctatcaaatgtatcaggcatatagtatttacattatgtcatatggacaatactatttgttgacagttgtatgtggatttatagccagtatgctggcggcttcagtgtctatgttagtagcggctaaaatgcatacaattagtgtcgctgtttgcattccattctttttatattgcttattgccatttataggacgggcactttctgggtatacaacgcttttcaatttgataccaacaattttgacaaatgtacaggcaagtgtaaaagtcccacttatttatcagattgggaattgtgtatttcgacaaattccgcttgtaatggtaatgtatacagtgatggcaatagccttactgccttttatttataaaagttttcgcagatacggaaataggtaaaaattgtattcatactcatgaaaaacaaagtaagtaaaatattttctggaaaaatcaaagcataatttaaagatttaaggcgggcaagttgcccgccttaaatttatggttaagaataaagtggttttaaaagaaagagatgcttggagtgatctggcaaattttatcggagatgagcagtataaaagattgatggcatatatgaaagcattgcagaagctggagcagatggagcgtatagtgaaggactaatctgtgaaatcaaaaattgtgacttcacgataaaggaacgacataagaagcttatagaaattgtaaccgatttgtttggaggaagaatggaagaaacaaaagaattgattactacagatgatattcgtagtaaagtgtatataattcgtggacagcaggtaatgctagataaagatttggcagaaatttatggctatgaagtaaaaaagttaaatcaacaagtaaaaagaaatatagaaagatttccagaagattttatgtttcggctatctaatagtgaaattgattccgtgaggtcacaaattgtgacctcacggaaaaaggatttttttgctgggcaggaaggcggacgtagatatttaccatacgcatttacagagcaaggaatttatatgcttaagtcgtctgacagaatattcatgtaatattgttctgcttcaatgtgagaattatcaaatacagttgcaaatgcatcagtggaatcggcaccaagctctgttaatttacatctcatcacatcaagaaaagcattcgctatctgaattcccttatcgttaaagccatcaatatagatttccaggtcagtcatgaatttccaaaaattttcatgtgtgagcaattcagataataatcttggattatatttttcgtcagtcaatatttggactgcatcgtcattcaggtgcagatcagatactgactgatttttatgtttccgcaattctgtccggcaaagaaggtaatctgtgcttacgttgtaaaaatttgcaagcgttataagattaccaagtgacatatctatattttcatctttttcataattgccaagcgtggagctagggataccggtagcatcggataactcttgcaacgacattcttttttctgagactcttaaatctttcagtctttctggtatggtaagttttgtatgcatagcatcttcctcatttttaaagatacagatagattaccatgatattgccatgagataaagagaaattcttttcctgtcttgtcttggatgttggaaaaattgataaaaacaaaatttttccagcatattggatataccgaatcggcatagaaaataatttcataaatcgggaaaggaagtgaagaatttatgaaatgttggaaacacatcagtatgacaaagccgataggcgtagctccgtgaaaaattattttcatggtttgatttatcgcagacaccagggattgggtaaaccgaataaaatctatgtccatgatattttacagccggaaactttcgaatggacaccggaaattcagttaaagaaatggagaaataagaaatgagaaaaatgtattatgaagacgcaaaagaaaatgcagcatttgaacgatgtagcgatgttatcactaacatgattaaaaatatggtctactgttaaaaagaagtgggctgtagaagaatggttaagaaatattcacgtgggatgcttttggaaagaacttgctgtaaagcgatatggaagatatgtagaaaatatgaagaagtggaagtttggactggaaaaaagtactgcatgacaatatcagattgacttacccatgaatccaatttataataaagtcaaaatgataatgacataaacggaggaaatgaaaatggaaaagattgaaacactggaagccgcgcttaagagaatagcagaattgaaaagtgaaaacgagaaacttcgtgaagaactggaatattataaaaacagaaagatgagcggacgacagaaacataatgccaagtggatggcaatctataatgattttgttgcaggttatgaaagtggaatgactatgatagagattgcaaagcgtaataatgtcagtgagagaacaatttacaggtataaagcgtattatgacaagatgaggaacacaaaggagaatgtgttagagtaattgaagaaattaatagtaaaaaacatattgctggcgtcagcaatatgttcataagaggagaaaatttgaatggaaaagagaataatagaattgtacagaagaaaatttgatgatatccgacatgaagcggatggcattgagtattggtatgcaagagaactaatgaaattattggattatgttcaatggagaaattttgataatgcaataaataaagcaatgatttcatgtgagaataatggaaacgtagcagaagatcatttttcaagatttaacaatacaattgaagttggaaacggtgcacttcgtgaagttgaagattatatgcttactcgttatgcatgttatcttattgctgaaaatggagatccacgaaaggagcagattgcttttgcacaatgctattttgcggttcagactagaaaacaggaattgattgaagaaaggatttcttatatcgaaaggacagaggcaagaggaaaattaagggaatcggaaaaaagattgtctcaaaatatatatgaacgtggagtagatgatgcaggatttggtcgtattcggtctaaaggagatcaggctttatttggtggatttaccacgaaacagatgaaagaacgtttgggcgtacaggataaaagaccacttgcggatttcctaccaacacttaccattgccgcaaaaaatcttgcaactgaaatgacgaattataatgttgaagaaaaggacttgcaaggagaatctgcaatcactgttgaacatgtggaaaataatacttctgttagagacatgcttggacaaagaggaattaaaccggaagatttaccagcatcggaagacattaagaaactggaacgtagagtgaagagagaagagaaaaagcttgcagagcaatctggaaagttgacaaatgaataatacaggagtgtgaaattattgaagaagaaaacaagatgttacatatatactcgtgtgtctacggctatttaggttgatggctatagtcttgatgcacagaaggacaaactaaaaaaatatgcagaatttcaggatatggagattgtaggagaatattccgatgaagggtattccggtaagaatataaagggtcgtcaggaatttatgcggatgctgaatgatattgaagatggcaaggacggagttgatttcgtccttgtatttaaattatcccgacttggtagaaatgcggcggatgtactcagctctttacagcttatgcaggattatggtgtgaacctaatctgtgtggaagatggaatcgacagttcaaaagaagccgataaactgcttatatctatcattgcggccgtagcagagatggagcgggaaaatatcagagtgcagacaatggctgggcgtgagcagaaggcgagagaaggtaagtggaatggcggatttgcaccgtatggatataggctggaaaatggggaatttgttattgctgaggatgaagtggaaattattcaaatgatttttgacaggtatattcataccaatgatggaatcaatggcgtggcaaattatctgaacaatcatggatatacaaaaaagctgcgttagaatggaacaataccggggttctcggccagctttattaagaagataattgataacccggtatatatggggaagatagcatatggacgcaggcgtacagagaagaaaacagggacccgtaatgaaacgtatgtagtggagcaatcagatttccctgtttatgagagaattcatgaagcaattattgccgaggaagactgggagcttgcacaggaaaagcgttcaaaaaataattataggcgtgaaaaaattcatgatccggaacatgcacatattttgtccggaatattaaaatgtctttgctgtggaaaaggaatgtatggaaatattgccaaagcagggagaaaagataacaagatcagatatctggaaaaacagttatctgtgttaaatgcaagtcttcatcaggcggaaacaataaaaacacgcattgaacagcagatggacaatctagatgttacagatactcattacgataaaaaaatatcagatttacagagacgattggatgctcaatatgatagaatagatgaaggggaagaaacaatgacagaactgaagtctcagatttatgagcttaaaaaaaatcagatgattatattaatgtcacgattgaacttgatgatgtggatataacatctgcagagactaaggcaacatatgatgagataaagaagcctatagggatattacagggaaagtcactaccgaagatattgaggcagaacaaatatgtaatgaaccaggtcttaacgaagaggaaaaatagttaataaagggaggtgcatatgctatgccaggtatactcgtggttgaagatgatgaaaatttaaatcgtggaattacattctcactgaaaaaatccggatatgaggttttttcagcagaatcagtgaaaaaagcgaaaagaattgcaagtgataataatgtggatgttatcatttgtgatgtgaatcttccggatgggaatggactggaatttgtaaggtggatgagatgcaattataatacatacattatttgtcttacagcactagatcaggagatggatcaggtcatgggatatgaagcaggggcagatgattatattacgaagccgtttagtctttcggtacttcttttgaaaatagaagcacatttccgccgcagacaggagaaaacggaagccggaaagatgatttcgggagatatcgtatttatcgcaggagaaatgaaagtcctgataaagagtcgtgaaatcagtctgacaaaaacggagttgaaaatgctgactttttttcttcagaatccgaaacagattctttcaaaaacacaaatattggaaaatgtgtttgatctggaaggggattttgtggatgaaaatacaatcgctgtcaatatcagaagactccgtgagaaaatcgaagacaatccggctgcaccggtctatataaagaatatcagaggtcttgggtatatatggaatcaggaggtaaggcagtgacaaagagatatcgcaagaagattacagtagtgctctccttggtattacctgtcatattattgtttgcaatattaaattgctttaccacgtatgtgttttatgaagattataaatataaaatgaatcttatgacagagattgctgcaaaggaagaattttccgggctggatgctgtttcggaattgcttaaggataaggatattgaaactaacgaacagggaaggcgattattggagcaatatggatactggggaaataaagggaatgcattttatatgcaattccggcatcaggttatggtgaccggtgctgtaagcactgtgatatgcgtgcttcttttgacttttttactttattggaagaaaaaagaagatgcgtgtcatcagaaaattttagaccagttggaagaaattctgatcagattccgtgaaaataaatttgatgatttactgaaaacggaaaatcatgcagaactggaaaaattgaatgaccagcttgaagcaatcggacatcatattcagttgataaaggaagaagcaagggcagaaaaggagaacacgaaagaaatggtttctgatatttctcaccagttaaagacaccggttgcagctttggatacatgttttagtgtgctgatgcagaatgacttaagtgccacagaacaggaggagtttcgtattcgttgtcggagtgctctggatggactggagacattattgcagtcgcttcttgaaatatccaagatggaaactggactgattcagattaataagaaaaaacttccgcttatggatactgtcatatctgctgtgaaccgcacttatcctaaagcggatgagaaagaaattgaattcgtttttgactatgaaaaagagctggaaacatgcacgattatgcaggataaaaggtggcttggtgaagctgtgatcaatgttctggataatgcggtcaagtacagtccgtgtggttcaaaaatatttatccggttacaaaaaagaaacgatcttgtaagaatggaaattgaggatcagggaattggtattccgcagaatgagtatcacaaaatttttcaacgattttacagaggaagttccaaggaggtcatggaaaagagtggtacaggaatcggactttttctatcgagagaaattatcgaaaaacacgcaggtacgattacggtaacctccggcaaaaagaaaaaaggaagcacgtttgtgattcaattaccatatgattacttcctattaggaacactgtaaatacaaggcttttcggagcctgcaaaccagaaaaaataatatttgatctatcacattacgcaaaaagccgtccggcatgagaaacgggcggcttttttgcgtggatagacggaaaggaggcgcaaaaataactacaaaattttagcgttcaaatttgtgcaactttaacgaaaaggaggatcgtaaatggccgatgaaaaactgaatactggccctgcggagaatatttccccggaggccgccgagcctatcgccacacccgaacaggccgtagcatctgaaccccagcaggaacagaccgggcctgccatacctgagcccggcgatgtggttgtgtcctttgacaaaatcaatgagcttatggcagaaaagagacagaacgcccgcgccgaagtcgaaaaggcggaaacccccgaagcgtcggaggcggcagcccccggagaaacaccgcagccagccaatacggaggaaccgaaaaagccgcgccgtggccgtccgccgaaagcagaaaaggccgcgactgaaaatcaaaaatcggagaaatcggctggggcccgcaagggccgcccacccaaggcggataagacggcccctgacaagcccaagccgtccaaacgagacaaagtgtcccgaagtgacggaaaggccccggatgccaaggagcccattaagcccgcacaggatacggcaccgaaggaaactgccactgcggaacagacggctcccgagccgaccacaccgccccgcccgattgaggaaggcaagctggtttatctgaaactttccgaggttcatccgtttcacacattccgtccgcacccctttaaggtacgggacgatgcgaagatgcaggaaatcgttgcttctatccgcgtaaacggtgtaatggttcccggtcttgcccgcccggagaaagacggaaacggctatgaaattgtagcgggccatcgccgtacccacggcagtgaactggcggggctggaggaaatgccctttattgtccgtgaaatgaccgaccacgaagcggtgcaggccatgaaggacagcaacaagcagcgtgacgggatgctccccagtgaattggccgcgctgctggaacttgaggttgaggacattaagcatcagggcgggcggctgaaaggcgttgcggaaggcgatgttggaaaacgctcggttgagattgtgggcgaggcgcatgagatgaactataaaaaggtcatgcgctacttgcggctcaactctcttgtgccggagcttctggataaggtagacgataaaaagatgggctttatgcctgccgtggaactgtcctacatcaaaccgaaaaatcagaggcttattgctgtttccattgacggggagcaggcttcgccctcgctggcccaagctaaacggctccgggaactggataaggaaggcaagctcaacggcgatgtcattgacggcatcttatcagaacagaaaaaggaggatcgaggcgtgattatttctactgcggaactggaaaagtattttggcaaggaggtaactcccgccaaaatgaaagaacagattatgtccctgctggatgactggaaagaaaaacagccgccggagctggcaaaagccccgaaaaagcaggaacttgacaagtaacaacttcgagacactttgtcccgagggccccgccctcgcgcagaggctctggtggtatatatcccccgtcgccgcctgttttttagtacagccgggagtgggccgtcaagggtgcagcgcaccgccgttttcggcggctcgcccttgacggtctgccccggctgtgctatttccccggcaagcggcgggggtatatcctccagagccgccccctttcccaagactgggaaagggcgtggggtttgggttgaactttcttattaaaatatcggaggtatgaacgatgaaacgaccccttgcttatatcaccgctgcatggctcggcggcgatagcgaaaacgcagaactggcggcgcagtattgccgcaccgtgtatgaggcaggcttttctcctatttgtccgcctttgtacttgcccctgtttctcaatgatgctgttcccgaggagcataaaagcggcatcgacatgagccgtgacctgctccgccgttctcatgtgctggttgtttgcgggcacagtatgaccgaagccatgaaaaatgatattgccgtggcccagcggctgggaattacggcaacaacccttgagggcatcctgaccgtcaagggacagggccgccgctaatggcaaccctgtttgaagcctacgttaccaacgccggaaagtacagcgagggccagcttgtgggtgaaacactgaaatttcccacaaccgcccaggaggtggaggctcttttgaaacggatcggcgtggatggcgtccgctatcaggaaatctttattacctctttcgatggggatgtgctggggctctatgaccatttgagcgagtatgaaaatctggacgagcttaatcatctggcctgcctgctttccgagcttacctcatcggagctggaaacactggaggccgtcctcgacagcggcgatcactgttcttcggtgcgggacatcatcaatctgacacaaaatctggactgttacggcttttaccccggcgtatccgatgaggaaacgctggggcgcatttatgtggacgatctggaaatgttggatgtgccggatcaggtaaaaccatatttcgattatgaggcgtatggccgggatgcctgcatccacgaaaacggccattttgccccgggcggctatgttgtcaaagaaagcgatcatttcgtggaagtgtatcacggcttgcaggatattcccaaggaacataaggtattctctttcccgaagctctctatccgggagcaaatggccgcctatcaggaaatcatagacggttcttcgctggagggctaccgtcaaatgcagaaaaaagaccgtggggatcggtgacggtacttcgagacaaattgtcccaaggaaggaggcggtgtaactgattgatgaagatatttcccggcgcacgatagccatatccgtaaaaacaaccaagctgacggcgcggggactggcgtatgtgctgggtatggtggggcggaagatccgcaaggcataccgtgggcggcaaacaccacacggcaagcaaagtgtgcgaaagctcatggcacacggtacatccacaaacagcatcgagctatccggggatgccaagtcctttgaccgtgtggcccggaaatggaatgtagactatgcgttctataaaaccgggccggacaaatacctgttgtttttcaaggctggacaggcagacgcaatgaccgcctgcttttctgagtattcccggaaggtgttaagcaaagcaaaatcgaaccgagttcccatccgagaacaactgcaacaggcggcggatcagctttccaaagaaaagccgaaacagaaagaacatgcaaaggaggtggcccatgaggacagataagattagaaaatatctcattctgaacattccctatctgttcatcctgtgggcgttcctcaagctgggaacggcctaccggctggcggcgggtaacgattttgcacataagctcatcgggctgggccagacgattggcccggcctttgctgactttgcacccggtcttgccccgctggattggcttgtcggcattgtgggcgcaatcgttttccggctgctgatctatttcaaaagcaagaacgccaagaagttccggcgggatgcagaatacggcagcgcccggtggagtgcataatcttaactgtaaacaacgactttatggacgcaggaggatatgcacatgagcaattacaataaaatcacagccctttactcccgcctttccgtaggcgacgaggacagggacggcggcgagagcaacagcatacagaaccaaaaaatctttttggagaactacgccaaagggcagcacctaaccaatatccggcactacattgacgacgacgaaagcggcaggttttttgaccgttctgcttactcccgcatgattgaagatgtggaaagcggaaaaatcggtgtgtgtattatgaaagaccttacccgctgggggcgcgactatctccaagtcggaaacgctatggagattttcaggcggaacaatgtgcgctttatcgcagtcaacaacggcatagacagcgaaaaccccgacacattagagtttgccccctttatcaatatcatgtcggagtggtacgcaaaggacatcagcaagaaagtgaaaacgggcattaagaccaaaggcatgagtggaaagccgattgccaccgaagccccttacggctatatcaaagccccggacaacaaggatttttggataatcgacgaggaagccgccgaggttgtacgccttattttccgtctgtttttggacgggaaaaaccgaaaccaaatcgccgtatatctgacacaggagcaaatcccaacccccactttctacatgaaagaccgcgggcggggaacttgtaaaaataagacgctcaacgaggataaccgttacaagtggaacaaagccacgctgacccatatcctcacgcggcaggagtattgcggcgatgtagtcaacttcaagactacaaagcattttcgggataagcgaaaccactatgtagacagaagccagtggcacatcacagaaaatgtgcatgagccgattattgaccgcaccgactttgaaaatgtgcagcggattttggaaaacgcacctgtcaaacgccccaacggggacggagaaatccaccctctgtccggcttgcttttctgtaaagactgcggcgcaaaaatgcacattcgcatagattaccgaaacggcggcaagcgccatgttgcctattgcagcgagtaccacaagggaaaagccaaaaatcccaagtgcagctctccgcacatcatggacgcggatctgctcatgcagaccgtagcagatgtgctgaaaaaaatcgcggaatactctatcagcaaccgggcagagtttgaagccttagtgaaaaagagccttgccatgcagcagaccgacaagacaaagaaacagcaaaagcgtatcccgcaaatcacgacgcgccttgaacagattgacaaggtgctgaataaactttatgaggacaacgcgctggggactatcccgcaagaccgctatgagcagatgtcgcagaagtattccgaagaatactactcactgaaagccgagcttgaacagcttagggaacagctatccgcttttgagaacgcgggaggacgggcgcagaagtttgtaaagctgatagaccgttacgctgactttaccgaccttaccccgactatcctcaacgagtttatcagccggattgaagtgcatgagcgtgacaagaaaagggcgaaacaggctattcagcatatcgggatatattttaaccatatcggcagatttgaaaatgaactgacacagcttgcagagccgacagagcaggaaatccggcaaatgcgtgaggaaatcgaagaagcaagaaaggaaaagagccgcgcctaccaccgcaactattcaagagaataccgggcgagaaatcttgaaaagaggcgggagtacgaccgtatcaaagcgcgggaatatcgggcgaagaaaaaggcgcaggctgccgccgcactgtccgcaccataaaacagaatagcaacatcatagagggattttccgaactacgggaagtcccttttttacgcccggagaaaggagtaacctattgacagaaaagaaaggaacacccaccccaccgaccaaaccggacggagttatcacgacacagagaaacgggcagaccattgttgcggagctgttttttaaccacaacgccacagaaacattctccgacaagctgctgaaaacgatacttgccgacagtctgcgtttttctgcgtctgacggtcaagagccggaaaaaacagaaatcttgcgataacagccgccccgacgatacattccccgtttggacggtttttatcgtcaaaaacgcagttttccccaagtcaagagccgaggaaaacacccgaaaaacacccctattgcgtaacagggacgcagaaaggagcttgcatgagaacagggcttaccaaacaggaaaagaccaccgatatatggtttgacgagaaagacccccttatccatatccgcacccacaacaccaacctcaaaaagcggcttgccgcttatgccgagcagtaccccgacgagtgctaccagaccgacacagaccacgaaacaggctgcatggagtttgatattgcaaaggggcgtttctctttccgtctgaccgccccatacaatgagcaacgccggagagccgccagcgaagcggcgaaagctaacgcaagcaatctcacgcgaagtgtggtataattttttgaaaaagtttgagatttgatgtagtattcgtcgttaaaaccgtagtatataggtgaagccggagaggaggcggtgcaatgatagaggatgaaaaaatcatagaaatgttttttgaacgttcagaacaaggcatacgggagttggatataaaatacggaacagtctgccacaatctttcctatcatatcgtaggaagtaggcagaacgcagaggaatgtgtaaacgacgcttatttaggtgtatggaacactattccccctgcacgacctaacccacttttatcctatgttctgaaaatcgttcggaacatttcaatcaaaatttattggagaaaggaagcagccaaacgaagcagccattacacgattgctttggaggaaattgaaacctatgtagcagatactcacacagtagaagcagaaattgaagctaaagaattagcccgtatcattgaaagttttttagatacgctgactactgaaaaccgcgttattttcatgcgccgctattggttttctgacagctacaaagacatagccgaggttgtggggctttcagagaaaaatgtctctgtccggctgacccgtatccgcgaaaagatgaaacaatatttaattgaaagagaggtctttatatgaacgcaaagaagttttccgacgctatgagcgagcttgacaacaaatacattgacgaagcccttaactataagaaaaaggtcaagaagcccatttggattaaatggggagctatggtagccagtttgctccttgtttttaccatgtctgttccagcattagcggcagcagattttggaccagcttataatctactctacaaggtatctccggcaattgcccaaaagttaaagcctgttagtatgtcctgcgaggataatgggattaagtttgaagtaatttcggcttatgttgagggtagcgaagcaaagatttttatttccgtacaagatattgacggagatagaattgatgaaacgacagatttgtttgatagctttagtatcaatacaccttttgattgtagcagttcgtgtgaaaatataagctatgacaccgaaacaaaaaccgccactttcctaatttctatatcacaatggaatgaaaaagacattattggtgagaaaattactttttgtgtccgagaaatgctgagcaataagcaggaatatgatgcgatattgacagatttggatttgacccaaattagtgctacaccaaaaacaattaccccgactcaaatttggggtggtgggggaacaaactacaatgaaatggaaaacaattttcaggcattgaaaacaacaggtattctgtgttcccctattgctgaggtagatattacagccatgggatatgtggatgggaaattgcatatacaagtcaagtacgaggatagtttagaaacggataatcatggctatatctatttcaaaaatgacaaaggagaggaaatccactgtatcgcaaatattgcattttctactgatagtgaacatcaagaacggtatgtggaatatgtttatgatttgtcagatgttgatttaacccaatataaagtatatggatattttgttacgagcgatacacatatcgaaggaaattggagtgttactttccctttagaaagcataagtcaataagttttcgtagttaccgatataaatacaaaccaaataattcaatgagagcagcctttttcacacaaaaacggctgctcttttctatgctatgagcagaaaggagcgatcaaccatgacaaagccaagagagaaaacccgcgaggaactgcaagccgaaatcgaggacggaaaaaagaaaatccggcagtttgagaaccgggaaaaggtgctgcggcaaaagctgtcgcaagaggaacgccggacacgcagccaccgccttattgtccgaggcgcagtctttgaaagcattgtgccggaagcaaagaacatgagcgacgaggaagccgcagcacttcttaggtttgcactgacgagtgagctggtacgggaatatctgaaaaaacgagccgagaacgggaacgctgaataaatcccttagacactaagggcgcacttatacaccctaacgggcgtgtgcgctctgccgagggctttatcttaagcacagggattttaccccgcgctacgattggcggctttgccgcagacaggggacgctacacttcccctgcgacagcttgcgctgtctacccttttgtgtacttgcggaaaccgaacaccttgctacgcaagctattcattttccacaagttttatatccgctatactggaggtgatacccatagccatttaccattgtaacatcagcatagtcagtcggggcaaaggcaaatcagcagttgccgcagccgcctaccgaagcggcgaaaagctgacaaacgagtgggacggaatgacccacgactacacccgcaaaggcggcgttgtccataccgaaatcatgctgccgccccatgcccagccctctttctctgaccgttctaccctatggaacagcgtggaactttatgagaaagccgggaacgcccagcttgcgcgtgagattgacgcagcactccccatagaattatcacgagaggaacagatacggcttgtccgggaatactgttcctctcaatttgtttctaaaggaatgtgcgtggattttgctatccatgacaccgacagcggcaacccccattgtcatatcatgctgaccatgcgaccacttgacgagcgcggcgcgtgggcggcgaagtctaaaaaggaatatgaccttgatgaaaacggggagcgcatacgcttgccgaatggcagatacaagacccacaaggttgacctcacaggctggaacgacaaaggcaacgccctcttgtggcgcaaagcgtgggctgatatttcaaacagctatcttgaacgcgccggaagcacagagcgtatcgaccaccgcagcaacgccgagagaggaattgacgagatacctactgtccacatgggcgtagccgcctgtcaaatggagaagaaaggcatagccaccgagaaaggcgaactgaaccgggctatccgcaaatcaaacagactgataaaggaaatccgggcgcagatcggcaacctcaaagaatggattgccggactgcttgcggcgtgggaaacttccccaagaaaacaacaaccgccaaaatctccgaaccttgcaaatcttctgatgaagtatttgggcgttcagagggaaaagagccggaagtattcgcagagctggcagcaccaacacgcagccgacgaactgaaaaccatatcacaggcggcgaattatcttgcggagcatggtatctctacccttgacgagttggacgcttctctttcctctgtcagtgatgaagccttttcaatccgggagggaatgaaagccgccgagcagcgcatgaaagagctgcaaaagctgatagagaacggcgagaattatttgcagtacaagcccattcatgcagaactgaaaaagctgaaaaacggctggacgaacaaacgggataagtatgaggaaacccaccgcgccgagctaaccttatggaatgcagcaagccgctatctccatgcaaatctgacagatacaaagacgctgcctatctccaaatggaaacaggaatacgccgacctcaaagagcagagagataccgactacaccaaattgaaagctacccgcgccgaggttgccgagcttcagaagatacgcaagtgcgttgatattgcgctgagagccgagcagccggagcagacacagaaccgtaccaagcggcatgatatagaccgctgaaaggagttgaaattttatgtattacacccaagaacaaatagaccgagccaaccaagccgaccttgtttcttttcttcaaggacggggcgagcagcttacccgcgccggacaggaataccgttggaaacggcacgacagcttgactatccggggaaacaaatggtacaggcacagccaaagcaaaggcggcgcacccattgattttgtcatggagtttttcggtaagagctttaccgaagccgtagaactgctgacaggagaaaaaggcgcagcaccaccgccggacagaccaagccctgcgtccttttctgacttccgactgccgccccgcagctccgacaaccgcatagcgaggaactacctcacagccgcccgccacattgatgaagatgtgtcgggctttttcttttccaccggggatatttacgaggaagccgcccaccataacgccatatttgtgggacgggacgaggacggagtaccacgctacgctcatcagcgcggcacagccgggaacttccggcttgatgtgaaaggcagcgataaagcctttaacttctgctaccggggcgagggcgaaaggttgtttgtctttgaagcccctattgacctcttatcttttctctgcctgttcaaaaaggactggcagaagcaaagctatcttgcgctgggtggcgtgggagataaagcccttatgcgctttctctctgaccgcccgaacatcaagaccgtatatctctgccttgacagcgacaaagccggaaacgacgcttgcagccgccttgtggagcttatgccggagggcttgaccgtccaccgccttatccctcttttcaaagactggaacgaggtgcagacgcgccggggcgaaatcacagacgggaaatatctgcgggaagctgtctatggattgaaagaaccgccacaggaagaaaccgttgagattatccgcatgagcgaggttgacacacagaccgttgaatggctatgggagccgtatatcccctttgggaaagtaaccatagtacagggcaaccccggcgagggcaagaccacctttgcgctgcgccttgccgctgcctgtaccactggcgggacgcttccgggcatgaagcctatacagccgtttcaagtgatttatcagaccgccgaggacggtttgggcgataccgtcaagccccgcttgatagaagccgccgcagaccttgaccgggtgcttgtgattgatgaagcaaaacgggagcttaccctgtccgacgagcgcatagagaaagcaatcatacagaacggggcgcgtctgattatccttgaccccatacaggcgtatatgggcgacaaagccgacatgaacaaagcaaacgaggtgcgccccatttttcgccgccttgccgaagttgcagagcgtaccgggtgcgccgttatccttatcggacacctcaacaaagctgccggaggacagagcgcatacaggggcttaggttctatcgactttagagccgcagcaaggagcgtccttttaatcgggcgcgtgaagcgtgagccgaatgttcgtgttatcattcacgacaaatcttcccttgcgccggagggaaagcccgttgccttttgccttgacccggaaacaggctttgagtggataggcgaatatgatataactgccgacgagctgctgtccggcgcgggcggcaacaacgccaccaaaaccgaacaggctgaaaagctgatacttgacctactggcagacggaaaagaacttgccagcgaggacatagagaaagccgcagccgacgcggggatttctgcccgtactgtccgggcggcaaagaaaaaccttgacggacgcattacctcaaagcgtatcggcgcagcatggtatcacgccctaaaaaagtgaactggcaaaatccaagtggcaaaacccagataccttgccactttgccacttcgccacttcaaccataatcccaccgccccatgtatgaccgcgtggggctttatcgtggaaaaaagagcctatgttgcgtcaataactctaaaaagcacttgacaaaacgcttcatggggaacggaaaaagacatcaaaccgtttgtcgatccgaagtttgaaaacaacgtgattttgaccgggacggagtttctcacgatgaatacccgcccgaaaattcccgcaaatgcccgaaatctgaattgctgtattatcggctcgtccggctccggcaaaacccgcttctggctcacgccccagcttttacaggctcattcctcttatgtggtggtcgatcccaaaggcggtgtgctgggacaggtcgggggtttcctgcaaaaacgcgggtacaaaatcaaggtattcaacagcatagatttttcaaaatccatgcactataacccgctggcgtatatccgcaatgaggccgatattctgaaattcgtggatgccctgatttccaacacaaagggcgaaggcaaggaaggcgatccattatggacgaaatcggaaacgcttttgtactgcgccctgattgcctacatcattttcgaggggcctgccgaggatcggaacatgaatacccttgtggatatgatttccggcatggaggtcaaggaggatgacgaggattttatgaacgcggtggattatatgtttgccgggctcgaaaagcgcaagccggattgcttcgcagtcaaacagtataaaaagtacaaattggccagcggcaagacggcaaaaagcattttaatttcctgcggtgcgcggctggctccctttgacatcccgcagcttcgtgaagtcatggcctatgacgaattggagcttgaccgcatcggagatcggaaaacggcggtattcttcattatttccgataccacgcagacctacaactttttagtggcacttgcattttcgcagatgttcaacctcctgtgtgaacgggcggacaatgttcacggtggccgcctgccgcaccatgtacgggtgctgtgggacgaggcagccaacacgggacaggtgccccagctcgaaaagctggtcgcggttatccgctcccgcgaggtgagtctttgcctgctgtatcaacagttggcacagtgcaaggccatttacgataagcacgccgagacaatcctcggcaacatggacagcgtggtgttcctcggtggccgcgaagccagcactatcaaggaaatctccgagaactggctgggaaaagccacaatcagtatgcagaccgacagccgctcccgtggccagtcggaaagctacagccaaaacacccagcggctgggccgggaactgatgaccccagccgagcttgcaaccatgccgggagacaaatgtattttgcagcttcggggcctgcccccgttcttctctcccaagtatgatctgaaacggcatccgaactaccgttatacggcggaggccgataaacagaaaaacgcttttgacctcgacaggctcattaaccgccgcaggcggcccgggctgaacgaggcgtgtacgatgtatgaggtggctgtgccggacgatgcactcacggaagaggacgaggacatcctcaactatgatgacatcgacgatccagacgcctttgcataaacgcttcgagacaaagtgtcccgaagtttgtaacctgccgcctgcatgggcggcttttttgttaccgggaaaatcccggagaaatggaggcttatatggcatttttctcatctgcaatcgacactttacagaccctcgttatcgcgctcggcgctggccttggcgtatggggtgtggtcaatctgctggagggctacggctcggataacccgggctccaagtcccagggcatgaagcagttcatggctaattaaagggagcaaaaagaaaggaaaagcacaatccagacggtatcagcggcaggttacaagaataaattgtgatttcacaagattggtgctataataagagaaaagttcctgccggggcagccgccccggtggtatggataggaaggcgggaaagcaatatgcacatcagctataaaccactctggcatacactgttagagcgtgatatgagaaaagaagatttaaggcttgctgctggtatgacaacgaatatgattgccaacatgagcaaagagggaaagcacatcagcatggacacattagcccgtatctgcgaaacgctgaattgtgagattaccgatgtaattgagttagtaccagacgagcctgcttccacaggaggtaaggaacatgagcgaattgaaaccaagaataacagaaaacggaattgattatatccttgttggagattactacatcccagacttgaagctgccggaagaacaccgccccatcggaaagtacggacggatgcaccgggaatatttaagagaagtccacccagccagattgaacacattgaccttgaccggggagttatggacataccttgcagacctgaacgaacaggcacaggaacggttagacaccatcatggagcagatgaaagccaccgagggcgtgaccgaggaattgaagcgtacccgtcaaatggaatgggtgcagcgttgcaataacattcacaaccgagcagaagaaattgttttgcatgatataatttattcatacgggagtaattaaatcggaggtatataagatgattgaaattgtatttggtgaaagtgcctgtggaagtttgaaaattgcccaaacttacggtaagggaaagtatagaggaagtgcagtttcggtctttatgagaagcacgaagatgggagtgttccatcttcagatgaaatgaaagaagcacaaattcaagcacaggaacaagaacatattgcttgggagaatgctattccattgggaggcaagagcagtgatgtttattgttttgatatggctcttagtgtgggagatatttctgataatggaattggcgaacagcggaaaaatgttctcaagaaaatgctgtctgtctggtttgtagaggatttagactatcaggttgaagaaaaaatacagaaaattaaaactacattgtcttcggttattgaacgatatgtagctggggaagaagttcgtatttggtatagctataatccggatgaactttgcggtatgtactggcttatgaaacaacttcgaccattaaactgtcagacaacaatttatttggttaagttacctgcctgggaatatggaaaagaaaatactatgacatccaaaatagcatggggtgaggtttctcctggcgaatggggaaaatatataactctacaagaaaaagctaagcctgtatttctttcagcttgtgctatgaaatggaatcaacttcaaaatgaaaatgcacctttgcgtgcaatgctaaatggtaaattgcaaagtgtttcagaagatatatatgatagtttcattcttcgtgaaattgcggaacagccagagcaattcaaaatggctattgttataggtaatgttttaggaaaatatcaacttggaattagtgatgtatggatttctaatcgcattgataaaatgcttgaagatggtgtgttggaaattatacaggacgcaccaaagggagaaacaaattatcgccggatattaagaaaacgaatgaaataataaccacagcaagaaccgctgctacatggaaggcaccccaaccatgcaacagcggtttttttaccgttttttcctctggctgataggcgttcccattttctttgattttttgagaatccgaatgagccagcgaaattcttcatctgacagatttttatagttgataccaagttgcttgcagtaaaggacaaccagcttttcatcccggctgcccttgaaattttcgaccgcttccagattttctttcagttcatcggcaacggtggtctggggtgcactctcactgtcctttttgtgggcttcccgaatatcccggataatgaggttgaggtcatccagaaccatgtgactaaaatactcatcatcgctgatatgggcggcttgcagcactttcaaatgcgggtcatcttcgccggggcgataccgttcaatgatttcatgccggacggtatcgacaagtgcattgagattttgaatctgcatggtggcaatcccgtccacataaatctcaatgtctgcaagaaacttgataaaatctttatgtgtggcaagctcacagagcagacggttgttaatccgactgcttttcagaagtgctaccatctcatcattcaaatgcagctccgtcaatgacgtgttgatctgctccctgttctctgtccggcacagtagataatcaacggaaaccccatagaagtctgccagcgtgataaggttgccatgattgatttccttaaaatcctctttttcataacttccgagagcagatttggaaatacccgtcagctttgatagttcttccagatttaagcctttgtccttgcggagttcccaaaggcgttcctgtatgcttgttgctcctttcatgggcgcacactcctttccggcggtttcattgctgccgcttaactggattatatcacactttccgcaatcgtggaaatttctgatttttactcctaattcctactttgtggacatacggcacagggcacaaaaatgttctatgatacaggtagttcatcgatggattattccaatcgaatgaccagcctgtgtgggatatgcttccccggcgatgtagtgccatgacttttggcagggatatggaggaacccttaccaaaacgagcataccaaagggagcgatacgccgctgtgagattcaggggaggaacgacaccggggagaactggcgaactgacaccgaaatgataccgaaacacgacaatctgatagggggacagtctaccctatcgctgatacttcgggagattttaagcggctctatggctgtaattttgccgaaaatcgccccgaaaccatacactaaaacgggaggaagcgcaatatgccgagaatgagcaaaaagaggaagcatgagctttccttttacctcaatgaccgggggcgtgtcacttacaacgaattatgccggaaatgccagcatgggtgcaggcagagcttccgggcggttgtgattgactgcccccgttatttatccaaacgagcaaagaaaaaggaggaacacaccgaatgaattttgaatttatgacgatagacacaccattgccgccctgtatgccctttcccatagcgttgacaggatttccagtcagcagcaccgcaaaggtcatgtactgccggatgctggacgctatgctatccaaagggcaggaggacgagcacggaatcctgtttgtctgcttccctgttacagccattgccgcagtcttgtcccgcagctctatgacggtcaagcgttctctgaatgaactggaaaccgccggacttatcatgcgggtgcgtcagggcgttggagaaccaaaccgaatttatgtgctgataccgggaaaggaggacgctgcccttgcctgatacctcaaagctggaaaagctcaaccgggagctggagaaaagcgaaaagaaactgcggaaagccatcaatgatgaaaaggcattgcagcaccagttaaagcagcttacccgaaaggaacggacgcaccggctctgtacccgtggcggtatgctggaaagttttctgcaagagccggaacgcctgacagatgatgatgtcatgctgttgttgaaactcatttttcacagacaggacacgcaggaattattgaaaaaactgctggaacggaagaagccagaaaccccttagtttactaagggcgcaattatacaccacccagaggttggtgcattgcgttctccgaaggctcctcgccggagggctgtgattttccgcagtcatggtctgctccaaatcatacaggggacgctacacttcccctgcgctggctgccgccagctacccttttgtggacttgccatctggggacatcttgcattgcaagttgttcccagccgacaagtttcataaaatacgctatcttttcgataggcaatgaagtataataaaattaccaataaatcaaaaattggcgaaggagttgattgatggacatgattagaatacttcaatttttagtattggcttttggtttaaaagaattgtttaatgcaatggaatatcacaaacagaagaaaaagaaatgggtaattgcctctttatgtatgggcatttttgcctgtgcttgtgcaattatttcaataacaggtattctgtaagtcggaattgataaggaaaaggaggatacacagatgaaaacagtaattctttataatattatttctcttatcatcatctttgttttgatttttgtcctaagaattgtcagtaagagtgatttacgtaaaaatcaacaacttattattaaagtcattacaactattttaattgtttgtgtaatagcatttgtgctttttattgatgcaatagcagttggcattataggacctgttccaaattaacaatcccagtttaccatccgcacatcgggtcaatttgccccgaacttttacaattaaatacccgccgcccacatagcggcacaccgagcaggaaatctgaaaaaggtctcctgctttttttctgccaaaatgaggtggtaaaacgccaccccatccaccaattaccgaaaggagggacacgaaatgccctgcccacacaacgaaatcacgattgttcagcgcagccagcgacagtctgcggttgccgccgctgcttaccaaagcggcgaaaagctgttctgtgaatacgaccagcaagtgaagcactacccggaaaagcgtggtatcgtccacaatgaaatcctgctcccggcaaatgccccgccggagtatgcagaccgcaatactttgtggaacgccgccgaagcggtggaaaaacaatggaactcccagcttgcaaggcggtgggtgcttaccatccccagagagataccgcccgaccagtatgctgtccttgtccgggagttttgtgagcagcagtttgtttccaaaggcatgattgctgattttgcaatccatgacccccatccgccgggacacaatccccacgcccatgtcctgctcactatgagggcaatggacgaacatggaaaatggcttcccaagagccgcaaggtttatgaccttgacgaaaacggggaacggataaaacttccgtccggcagatggaaaagccacaaggaggatacggtggattggaacgaccagaagtattgcgaaatctggcggcatgaatgggaggtcatccagaaccgctatctggaagccaatgaccgcccagagcgtgtggacttgcgttcttatgccagacaggggcttgatattatccctactgtccatgagggagctgctgtccggcagatggaaaagcggggtatccagacgaacatcggcaacctgaaccgggaaatcagagccgccaaccgcctgatgaagtccatccggcagcttatccaaaacctcaaaggctggattaccgagctgggagaaaaacggaaagaactgcttgcacaaaaaacggcggaggaagcaacacttcttcccaatctactgatgaaatatatggagatacgaaaggaagaacggaaggactggacgaggtctggacaaaatcgggggacttcacaggacttaaaggcagtcagcgaagccctgtcctatctccagcaaaaggggctttccactgtggaggacttagaagcatttctggaatcttccgggaaatcagccgcagattaccgcaatcagatgaagcccaaggaagcccgcagcaaagtgattgacgggattcttgccagccggacagactgcaaggaaggtaagcctgtctatgagaagtaccggaagatattttttaagaaaacaaaggagaaattcaaacaggaacacccggaggttgcccggtatgagaaagccgccgcctaccttgccaagcacccggacgataaggacagcacccaaaaggagctgcaagaggaacaggaaaaacttgttggcgaaatcgcagggctgaaagaacctttaaccgaggtacaggaggatttgaagaagctgcgggacatccgatactgggtacggaaagccacccccggcacagaggaaagcaaagaaccgcccaagaagcagccaatcaaggaagtcttgcaggataaggcagacgagaaaaaagcacaaagaaccgccccggcacaggcgaaacacagacaacaggatatggagctttaacaggcacttgccattttcaatcagagaatgtcaggtgcttttcttatttttaaggagggatagatttgaatgtatttgaagctgtgaagcagtccgttacaacaagacaggctgcggagcattatggaatccatgtaggtcggaacgggatggcttgctgcccgttccataacgataaaaccccaagcatgaagctggatcggcgttaccactgcttcggctgcggtgcggatggggatgtgattgattttgccgccgccctgtatgggctgggaaagaaagaagccgccatacaactggcacaggacttcgggctttcctatgaggattggaagccgccgggaaaggcgaaaaagcccaagccccggcagaaatcccaggaggaacagtttcaggaagcaaagaaccgctgcttccgtattcttgccgattatctccacttgcttatggcatggagaacggactacgccccacactccccggaggaagcctttcatccccggtttgtggaagccttacagaagcaagcccatgtggaatatcagctggatgtgctgctgttcggggaaacagaggaaaaagcggctttgattacggactacggaaaggatgtgatacagcttgaacagcgaatggcagagcttgcagccgcagacgcagcaagaactaaaaaacaccatgaacgccatgcagccgccccagagcattgaggaaatcaaggcggggctggaaaccaccgagaaaggcggtgtccgccagagcatacggaactgcctgaccgtattccagcgtgaccctctgctttccggggctatcgcatacaacatcctgaccgaccgcaaggacatcataaagcccatcggttttcacagagaaagcacagccctgaacgatacggatatgaagtatctgcttctctatctggaagaaacctatgggcttaccaatgagaaaaagattgataatgccatcgggattgtggcgaatgaaaacaagtaccatcccatccgggactacctaagtgcccttgtgtgggacgggacagaacgaatccgtttctgtctgcggcactttctgggggctgacgcagacgattacacctatgaagcgttgaagctgttcctgctgggtgcaatctcacgagcctttcagccggggtgcaagtttgaaatcatgctttgtctggtaggcggtcagggggctggaaagtccaccttcttccgtctgctggcagtccgggacgagtggttctccgatgatttgcggaagctggacgatgacaatgtgtaccgtaagctgcaaggtcactggattatcgaaatgtcggaaatgatggcaaccgcaaatgccaagagcattgaggaaatcaagtcatttttaagccggcagaaagaggtttacaagataccctatgaaacccacccagcagaccgcccccgtcagtgcgtgtttggcggcacttccaatgcccttgacttcctgccccttgaccgttccggcaaccgccgctttatccccgtcatggtgtacccggagcaagccgaggttcacattttggaggacgaagccgcttccagagcctatatcgagcagatgtgggcagaagcgatggaaatttacagaagcggcaggttcaagctggctttcagccctgccatgcagcggtatctcaaagaacaccagcgggattttatgccggaggacaccaaagccgggatgatacaggcgtatcttgataagtacaccgggagcatggtctgctccaagcagctctataaggaagccttgaaccatgcctttgacgagccgaagcaatgggaaatccgggaaatcaacgagattatgaaccagtgcattgaccgctggcggtacttcccgaacccaagaatgttttccgaatatggcagacaaaagggctgggagcgtgaaaacccggcaacggactccggcaacccgtctgaaaaaacgatggacggttttgtggaggtcacagaacagatggagcttccgttctgaaaatggcagcccgttgcaccccctgttgctatcccgttgccgagccggttgccggggaaaatcccgaaactatcggcttttctcccctatgacaaccaaaacaacagaaaaataaaagaaaagtataaatagtaaccatcgccagattgagattgtttgcaaggtcttttgaagcccgttgccggacttcgttgccgacaccctctgtctggctattttcatgtatggaggataactgcctatggcaaaaaacaaaacagagattcatgttacaacggtgtttgacggggagctggacgcaaccgatgtgttcgtcagcctgatttcccagaaatacggtaagacaaatacgaaagaatatcttgctaaaaggaaagatatgagctataatgaagatgaggttcaaaagagccagataccgtctggattgtgtgggtaaatggctatgatgaacgaaatggaatacagaacaatcggttcggcacttgccggagggtatcgtgcagcggtctattgcaggctgtcaaaggacgatgacctgcaaggcgaaagtgccagtatcgcaaaccagcgtgatatgctggaaaaatactgcgaaaagcagggatgggaggttgtggcagtctatcaggacgatggcttcacaggtcttaatatggagcgtcctgatttacagagaatgttgagagccattgagcgcaggcaaatcaaccttgtcatcacgaaagacctcagccgactggggcgtaactatctgcaaaccgggcatttgattgaggactttttcccaagaaacggtgtccgctatatcgccatgaatgacggtatcgacaccctgcgtgataacaacgatattgccccgttcaagaatatcctgaacgagatgtacagcaaggatatttccaagaaagtccattcctcttatcttctgaaagcgcagaaaggacagtttaccgggtgtcttgccccgttcgggtatcggaaagacccggaggacaaaaaccatctgctcattgacgaggaaaccgccccgattgtgcggctgattttcggatatgccctaaacggtcatggtccgaactatatccgcagacggctggaggaagaaaaaatcccctgccccacatggtggaaccgggaacgggggcttcgcaatacccgcaccaaatgggaaaagaaagacccggaaaacgggcggtatatgtgggacttctccgttatcaaagaccttttgatgaatcccgtctacaccggggcgattgcttcccagaaaaaggactaccgtttcaaaatcggcacgattggggaaaagaaaccggaggactgggttgtggttgagggacagcacgaaccgctgattgaccgcatgagctttgatattgtgcagaacaagctgaaatcccgccagcgtccggggcagaccaatgaaatcagcctgtttgccggactgataaaatgcggcgagtgtgggaagtcgctgacgatacgctacacaaacgcaaaacatccccagcggatttactcctgcaagacctacaatgcctttggaaagaaccactgcacccagcaccggattgactatgacaccctttacagccatgtgctgcggaaaatccgggaatgtgccagagctgccctgatggacggggaagcggttgctgaccgcctgaccaatacctgtgaagccgagcagcgggaacagcgggaagcaatggaacgctcccttacaagggacgaggaacggattgaggttctggacaaaatggtcatgcggctttatgaggatatgattgcagggcgtatcagtgagcagaatttcaacaccatgctggaaaagacacagaccgagcaagcggagcttaaagcaaaagtgtccgagggcagaaagcggctgtccgatgaagtccagcttgccaatgacgcaaaacaatgggtggaagccattcaggaatacgccaatatcacagagctggacgcagccaccctcaaccgcttaatcaaagaaatcgtcgtgcatgagcgcattgacgaagataaaacaagacacatttctatcgaaattcattttaatctcaaacccattccggaggtggaacaggtcactgcctgacctgtcccgccgggacggttctcttaaaaacaccatatagattttttgtacgccgccgcccgccatcgagcagagttttacacctaattgggaataaaacagctcatggcgggcggcggcatcatcgtcattggcaccacactgatccctctgctgtctggcctgttttaaggtaggcgcttatggattttctcaccgactggctcacaaactggctcaaagagcttctgattggcgggatcatgggaaacctcgaagggctttttgataccgtcaatacccaagtcggagagattgcggcacaggtagggactaccccggcggcgtggcacgccggggttttctccctgatccgacagctttccgaaacggtgatcctgccgattgccggaatggtgctgacctttgttgccacttatgagctcatacagatgcttttggaaaagaacaatatgcacgaggttgacgttgcgaacctctataaatggatgttcaaaacggcctgtgcaatcttaatcctgtcaaacacattcaatatcgtcatggccgtgttcgatgtatcgcagagcgttatcgcgcaggcaggcgggctgattcaaggctctaccgatgtttcggcggatatgcttgccgaactggaaacctcgctggaggcgatggacttggggccgcttttggggctttggctgcagtctgcgctcattggatttacgatgaaggcgatggggattatcattttcgttttggtgtatggcaggatgctggaaatctatctgctgaccagtctggcccccatccccgttgctacgctttccaaccgggagcttggcagcaccgggcaaaactacatcaagtccctgtttgccgtgggctttcaagggctgctgattcttgtatgtgttgcaatttacgcagtgctcattcaaggcatcgcaacaggcggcgatcccattggggcgatttggggaactgtgggctacacggttctgctttgcttcatgctctttaagaccgggagcattgcccagcgtatctttggcgctcattaacaggaggtggtgtttatgccgagaagatacggggcagacggaacgcgcttatggaacggaaaaacgccggaggagtttactgaggcagacgcttaccgctttatggcggaaccagaggccgtcctgcaaagaaaagagctgatggacgaccccgcccagcctgctccggcaagcggaaaggaggaattttatctgagtaagaaagacgatgtattgctgaccccggagcagattgctgcggaggaacggcgctggctgtttgatgctcccatcgcggagcttgcagaagtcaagggcgttagcattgatgaggcagtaaaaatgcggacagatgctgtcttgcaggaggcggttgttccgatcacggtatctgtccgcccgattgagccgcagggaaaactgatcggcttcgccagcgtcaattttggcggtgtggtcatcgacgattttaaggttgtggacgggaaaaacggaatttttctcggagctccctctaaacccgatcctgccagccggacgggataccgggctacggttcggattcctgaccacgccacacaggagcggattaacgcggctggtgtgaaggcgtatcatgcggcggtggaacagcttgttgcacgggcccaggcggtacggcctgccccgatcaaggagcagatggccgaggccgcgaaacaagctggaaaagaaaatgccgcccggcctgcacctgccaaagcaaaggaggcccgcaatgaccgatagccgcactttgggacaacgtgtcccgaaggagggcttgtttctcatggacggcatcgagggcttgcgttctttgccaaaacatagcgtggatatgctgctgactgatccgccctacggcacaacccggaattattgggatgtgcccctgccgctcccggagctgtgggaggcggtgaaatgggcagtcaaaccgaatggcgcagtgctgtttttcgcacagtgcccctttgacaaggtgctgggcgcatccaacctcgccatgctccgctatgagtggatttggtacaaggagcgcggaacgggctttctcaatgcaaaccgggctccactgaaaaagtccgagaatatcttggtgttttaccagaagtccccggtctacaatccgcagtttacttatggcaagccttatgcccgcgttcattcccgaagcggtacaagctccaactatgggaaatttgaacggcagggatcggagtccaacgatggccgccgctatcccggaaatgtactttttgtgcctacggtgtccggcggcatccaccccacgcagaagcccgtggagctctgcgaatatctgatccgcacctatacccgccccggagaactggtcgcggacatttgtgcgggctccggcacaaccgcgattgcagctatcaacacagaacgccgctttgtatgctttgaaacggccccggccttttatgccgctgccagtgagcgcatccgtgcggcgcaggcagtaaaaagctccggcgagaaaggagtgtaattatccagcagtattctatcatttacgccgatcccccttggcgctactcggctaagaaagtacagggcgcggcggaaaatcattatcccactatgagcattgaggatttatgtgcgttgcctgtggctgatcttgcagccccggacagcgcactctttttatgggctactttcccgcagctcccggaggcgctccggctgatcgaggcttggggcttcacctacaaaagcgttgctttcgtctggctgaaaaagaacaagaaggcggatagctggttttacggccttggcttctggacaaggggcaatgcagaaatctgcctgctggcaaccaagggacatccaaagcggcaggctgccaacattcatcaattcatcatttccccgattgaagcccatagcaaaaagccggacgaggcccgcgccaaaatcatttccctgatgggcgatctgccccgcgtggagctctttgccaggcagaccccgcccggctgggctgtatggggaaatgaagtaacaccaaccatcccggactttgggacacattgtcccgaagtacagaaaggagtgtgatctatgccctatgtaaacgtaccaaacgatttatccaaaatcaaaacaaagatggctttcaacctcaccaaacgccagcttgtctgcttcggcagcgcgggcgcagtggggattccggcctatctgctaacccgtggcaccctcggcaataccggggcgatgtttctcatgctgggaattatgctcccggcgttcctgctggcgatgtatgaaaaggacggcttgccctttgaaaaggttgtgcgaaacatcatccgggccaagtttctaaggccggggatcagggcctaccgaaccgaaaacatttatgcgccctttgccgggccgggcgctggaaaggaggatgtgattgaaaaacacaaagaagaaaaacggagccgccaagggtaaaggccgggcggccctgtctgcccagcagacaatcccgtatctgtccatgcacccggacggtgtgtgcaagctcccgggcgggctctatacaaaaaccgtggaatatgaggacatcaattactccgtggcatccaccgaggatcagactgccatattcagcggatggagctcattcctcaactactttgacagttcgctgccgttccagctttcctttatcaaccgccgttcccattcccgcagccgctatcaagtcaatatcccgaaagcggatgacaactataacagcgtcagggacgagtttaccgggatgctgaaaaatcagattgccaaaagcaataacggcattgaacgctcaaaatacatcacctttggcatacccgccgaggggattgcggaggcacggccccgtctggagcgtgtggaggccgatgtcatgggaaactttaagcggctgggcgttccctcggagccgatggacgggcgggcccgccttgcgctgcttcatagccagatgcatccggggagccgcgagccgttccgcttttcgtggaaagacatcccgcagaccgggcttggcacaaaagactttattgccccggacagtctcgacttccgccagtcccgcacattccgtatcggccagtattggggcgcggtgtcctacttgcagattatggcatcggagctttcggataagctgctggcggaaatcttggagctggatgcggaaatgaccgtgaccatgcacattcagaccgtggatcagctcaaggcaatcaagaccatcaaggggaaaatctcggacattgggaaaatgaaagtggaggaacagagaaaggctgtgcgctccggctatgacccggacattcttccccctgacctgattacattcagcaaggacgcggcggagcttctggctgatttgcaatcccgcaatgagcgaatgtttctgctgacctttacggtggtaaaccttgcccctactcgccagcggctggaaaacgatgtgtttaccgtgggcggcatcgcgcagaaatacaactgcgctctgcgtcgtctggactggcaacaggaacagggctttgtttcttcgctggcccttggctacaacgaggtagaaatccagcgcggtatgacaaccagctccacagccatttttatcccctttatgacaagggagctccgcatggctggacaggccctctactatggcatgaacgcactttctcacaatgtcatcatggctgaccgcaaaaagctgaaatcggcaaacgggatgtacttgggctctacgggctccggaaagagctttgccgcaaagcgcgagctcttgaatgtgtttctcaccatcccgcaggatcggatcatcgtggttgacccgatgggcgaatacgcgccgctggtgcgaaggctgggcggtcaggtgatcgagattgccccggacagcccgcaccatctcaatccgatggatgtggagctcaatatggctgccggagaaagcccgctttccatgaaggcggattttcttttgtccctgtgcgagctggtggtcggcggcaaggaaggcttgcagcccattgaaaagacggtcattgaccgctgtgtgcgtttggtgtaccgggagcaggcgctcggattggaaaccgcaaaaacgccgctgttgcaggatttgtacgaagagctcttacgccagccggagcccgaggcccggcgcgtggcaactgccttagagctttattgtacaggctccctcaatctttttaaccatcctaccaacgtcaagacggacagccgtgtggtgtgcatcgttctgaaaaacatgggcgaaaaccttagaaagattgcaatgcacatcacaaacgagtttgtttcgcaggcggtggatcagaacttccacgagggcgcggcaacttggtgctactttgacgagtttcacattctgctccgtgatccactgacagccagctactttgtggcggtctggaaaatgctgcgtaaaaaaggatgtgtgccgtctgctttgacgcagaacgtcaaagaccttttggcaagccgtgaaatcgagaacattctggacaacacggattttatgattctgctttcgcaggcgcagagtgaccgtaccattctggcaaaacagctcggtatttccgagcaccagctttcctatatcacacacagcaattccggcgaggggctgttgttctatggaaatgtaaccattccgtttgtggatcggttccctcgcggagaaatctatgacctgctgactacccgcccggaggatatgaagaatgaaacgaaaaacgaataaggccaaggaggaggcttggtcgcagaccgcccacgcccctgacggggaacagcccgggccggaggcttccgacacttcgggacaaagtgtcccgaagtccaagttccgcaaaaagagccagcaggaacaggctgcggcggcaaagctccacatggagtcccaaggcgaaaaactggaacaggcccgggagaagctggcaaagcaaaagccgccgaaaaagcccggcccggtaaaacgcataggccgtgttgccagcggttccgttcacagcttcgtgcatggcaagatttttgaagtggaacaggaaaatgtcggcacggaaggcgcacaccgttctgagcttgtgggagaaaccgcgctacggcatggctctcgctttgtgcgccgtaaagtccgggaacatccggcaaaagtggtacgcaaggccgaggcccgctataccaagtacacggcggactaccattttcacaccgccgcacaggagcacccggagctgacgaaaaatgcccttacccgctactggcagaagcaacggctccgcaggcaataccgcaagcaggcaaaggaggctgcaaagcagagcgcggctgcggctgggaaaactgccacagccacagaacgcctgactgcccgggcagtggaatttgtcaaaagtcatcccgcaggtgccgtgattgcggtgctctgtgtgttactcctgtttgctatgcagtcctgttcctctaccatgcttatgctggggaacgccggggccggtgcattaggagccagcacctatccttgcgaggatcgggatatgctggccgccgaagccgcctattgtgcgctggaagatgatttacagcattatctggacacctatgaaagcacccatgactatgacgaataccacttcgatctggacgaaatcgaacatgatccctatgtgctgctttctcttttgtgtgcgctccatgagggacaatggacaataggcgaggtacagggaacgctgcaaatgctgtttgaccgccagtacattctcacggaggatgtggtggtggaaacccggtatcgcacagaaaccgacacatggacggacgaggacggcaactcccatacggacacctatcaggtgccttacgactattacatctgtacggtcacgctggagaactttgatttatcccatgtgcctgtgtatgtcatgggcgaggatcagctttcccggtatgccatctatatggcaacgctgggaaaccgccccgatctgttcccggattctccctatgtgaacaagtacattactgggaaacccggtgactacgaagtgcccggagaatatctggacgatgaagcctttgccgcgatgcttgccgaagcgcagaaatacatcggctatccctatgtgtggggaggcagttctccggctacttcctttgattgctcgggctatgtttcatgggtcatcaatcactccggctggaatgttggcaggctgggagcccaggggctttataacatctgtacgccgaccagctctcccaaacccggtgatctggtgttcttcaaaggcacctatgacacgccgggcgtgagccattgcgggatttatgtcggtgacgggaaaatgctgcattgcggagatcccatcggctacgcaaatttgaatacaagctactggcaatctcatttttacgcctacgggcgtttaccgtgacaggaggttttgaaatggcaactaccaaaagcatgaaaattcaggccgagattgataaggtcaaggccaaaatcagtgaacagcaggcccggctcaaggagctggagcaaaaaaagctggaggcggaaaacagcgagatcgtggacattgtgcgcggtatgagcatttcccttacggagctcccgctgctgtttgaaaagctgaaggacggaggtactttgggacaaagtgtcccgaagtccgaagaagaaaagaaggaggaaaactgaatatgaaacactttcgtatgttggcggcggggctttgctccgccgttcttttatgcggctttgcaatcccggcctatgcctattcggacggcgggaatgaggaaccgcctgttgtggaagaaactccggccccggagccagcgcctaccattaccccgggcgagggcttttcggaggatggaaaccttgtgacccgcgatctgctctacgatgccgcaaccaacaaacagttcatcacggtggaaaccagcggcggcaacaccttttacattgtcattgactatgacaagcccgtggacgaggacggcgaacagtatcacacctactttttgaacatggtggatgaagccgatctgctggcggcactggaggccgctggcggagaacttccggcctgctcctgcacagaaaaatgtgcgcccggagccatccatacggattgcgaggtctgcgcggtcaatatgaccgagtgtgctggcacagctcccgaacccgctccggtgacggaacctgcggaggagccggaacccgagccccagcagaaaagtaataccgggacgcttctgctgattttggctgtggctgttctgggcagcggtgcaggctggtacttcaaaatttaccgcccgaagcatgaaaaagctgctgtacccgaagaggattacagcgaggaactggctgattatgacgatcccgaggacgatgggccgccttgggacgaggacgataccgaaagcgaggataatgaatgagatttaccaacaacccctatgagggatttatgaaagaaaaaagctactttaagggtgtgccgcccagcctgccgccgaagggcttccgttgtgacggctgcccttactggcgcgggatcggctgcgtgttctgctaccgggagcaactaaaaccaccgggcaacgggaggtgatgctgtgggccgagaactgacccggacagaaaaaacggcaatccgcaggctggtatcaaaatggtgtgccaactatgaccgggactgcggctgcctgccgctggattgcgagtgctatatgtttgggaaatgctggacgggggcttattgccgctacttccgcgaggcagttctgccccttgatccggcgctggaggctgcgctgctggcagaagggccaaggccggatttcaaggcttgcccggtatgcggcagagccgtggcttctgatggacggcaaacctattgttcggcggcctgtgcaaaggcggcacaccgcagacagcagcgggaatatatgcgaaaaaagcggggctgatgtgttgacaattaggacaccccaaacccgcctgtgacaaggctttttaaggcccttttctgcgggaggcgtatgtttctacgtccgcccctgtttccgtgagatgctgtcaacattttagctgccggagctttgggacaaattgtcccaaagttccggcttttgtggaaggaggtactatgccgaaatattatccgatcaatgaagaagccgcaaagcgggcaaaagatatgaacagcttttctgactatcagccgggctccgctacggcgggctaccgggcaatggtcgatgaagcgtatgcagcggcggaacgccagaaagcgcgtgtcgatcccatgtaccacgataagattgacgctctggtggatcgctatgcccggaaacttgcggaaaatctgaatgaacgcaatgtgattgatgcccgggtgccctctattctgatctccgggggcggcaattttcctgtggcaaaaaagcacaagcagaacgccgcccgggatcgcaactatggagagtgtgcggagatttcaaagctgcttgataaaatccgctctgttggtatgggtgggatcagcgcagacgatgatcttgccgtggaaaaactgacaaaaaagctggaggggctggagtcccagcagaccaccatgaaggaggtcaatgcgtattttcggaaacacaaaacgctggacggttgcccggagcttacgccggagcaggcagaaaagctcaaagcagatatggcgcagtcatggcacttggacaaaagtaagccgtaccccgcctatctgctttccaacaacaacgccaacatccgccgtgtacgccagcgcattgaggaactgagcagccgctccgagtttgctggctggacattccccggaggtgaggccaaaatcaacgaggctgaaaaccgtttgcagcttatttttgaggaaaagcccgatgccgatcagcggcaggaactgaaaagcaacggctttaagtgggctcccagccaaggggcatggcagcggcagcttaaccagaacgccatccgtgctgcggcccggatagactttctgcgacccgaggacggtacaagcccctatcagctccagccgtttgtgaaaagagaaaacaaagaaatgtctcgatgatgggaggtgtactatggacaaaaatcaaggctatgctattttgaaggcggtcatgctggaaaatgggcggggatttgcattgggcgaacatcccaccgcgccatcccgctatgtcacatgggcctgctatgatgacaaggacggccagcggcagtacgaatggggtcactatggaaatgaccgcaccgcgatggaacaggattttgcagaccgggtgcaggactatcagcgtatttataacgtggggatcaggcagaccgaggctcccggcctttacaagtattattcgacccagcggcctgtggacatcgggacattcccgaagccgccttataacaagccggatgaaatcttcaattacgatcagcgcatcccggtggaaaatggctcgttcctggcttggggctatcttacctatacccgcccgctaacggaaaaacaggcatccgactatgagctgcgtcctgcgcctgataatcccgacaggccccgtccgattgccgagcagatgaaaaatgcggcaaagttggcggaggcagatcgcggctcggaggctccggctccccaacggaggcagcctgaccgtggcgatagataaggaggtgcgtatatggaaaagaaacgtgaacaggaattgtctgtactggaggtgctgcgcctgcaccgtgaatttcatttgccgcaccctgttccggcagacgaacaggaaaagccgctggataaggtaaaggagccgccccgcgcctgccgcagccgggagcgtgaggagcgatgacaaaaaagcgccgccgtccgatccatcttcatgtgatggtgtcggaggcggagcaggctctgattcaagaacgtatggcggaggctggcatccgtaatatgggagcctatatgcggaaaatggccctgagtgggtatgtgcttcatgttgacctttcgcctgttcgtgagctggtttcgctccagcggcgctgctccaacaatctgaaccaagtggcaattcaagccaacacctacggcgcgatttatcccgaagaactcgcagccttacagcgggactatgccgctttgtgggggccgctgtctgatctcttgaaacagctctccgcgctggtagagctctgactcatccggggagtggttgataccgctccccggctttttctacttcgggacaaagtgtcccaaagtaaaaatactgtttgccggaaggagggatttttacggcgaccacctacatccgcccttataaaacagcggcgggaaaaagtgcaattcaaacgatggaggatcgtttcacctatggcctgaacccggaaaagctgggagccgtatcttcctatctctgcgatccgaacacggctcccgccgagtttcttctggtaaaaagtcaataccttgcagagacaggccgggccgtgtctcgcggggccctgttctttcagatccggcaggcgttcctgcccggggaggttacggcggaagaagcaaaccgtatcggctatgaaacggcgatgcgctggacaaagggaaagtatcagttcttcgtctgtacgcataccgacaaggcccatatccacaatcacatttatttcaatgcgacggcctttgaccgctcccggaaatttcataatttcattggttcgtcctttgccctgcggcggctctctgaccgcgtgtgcatcgaacatgaattgtctgttatccaaaatccgtgccagcacagcaagggtcgttttctccactatggacagtggatcggagaaaagccaccctctgccaagcagcgggtgcggctggctgttctcgccgctttggagaaaaagcccacggactttgccgactttcttcgtctcatggaggagtccggctttgcggtgaaacatgggcggggcggtgtcatctcattccttgcatccgggcaggaaaaaccgacccggctccgggcttctacacttggagttggatttgacccggaggacatcaaggcggtaattgccggggaacgtccactccccgaactgcccgaggagcccacggttccgccacggcgagttaatctcatcatcgacattcaagagcgtatggcccaaggcaagggcccggcctatgaacgatgggccaaggtctacaacctaaaacaaatggccgccgcgctccagtatttgcaggagcatcatctgacagactatgcggcgctgacggcccgcaccgaggctgctgtggatcactttcacaagctgtctgacgagctccgcacaacggaggaggccctttccaaaacctcggagctgatggcggccacggtggactatgccaagacccgcccggtgttcgatgggtacaaggctgcgcggtacagcaaaaagtatctggcccagcatgaagtggagcttgccacttaccgggcggcaaaggataccatgaacaccatactgaacggcgcaaagctccctaagattgaagcactaaaaaaatcccgccgtgagctggcgggacaaaagaaagagctttatgcagaataccgggatgcccagcggcaaatgcgggaggccgtggcaataaaagcgaacattgatcatctgctcggcataacggacgagcgtgagaataaggcacaggaacgatagtgacgggccgcagactacggtgcagcgcaccgggactttgggacaatttgtcccgaagtacagcgggtttggggagctccccaacaagcatttttgcgggccctgcgccctgcaaaaatttcggagtgtggccacacccgaattgcttgccaaaacgcgcaacccgcaacatggcgcaaaaaacggaggttacgctttcttttacgtttcctccgtttctttcgatgctttcatcgcttggattgtagcttcaacgattttcaattctctttcgtccaaagcgttcaacatggcatcaatccgcttcctgcactcgctcccgctattctgggacgggtaaaagtattgatccaccgatatatcaaacattgtgaccatctgataaaaggtgttgaagcttggatgctgaccatcattttcattatacataatggtacgcggagcgcggtcaacaatataggccagttgctcctgtgtcatgccgctggcttctcttgcacgcttgatggcgagccctatatcgtgaaaatcaaagcgtctttcatctcgttctatcttcataacatcacctgatatgattttacatttcatgtgatattatttgaacgattatgtatttcatgctactgactatttaatttcacattcttttcttccaaaacttgtattgttcgagtcgaagaactataatatactctatggaggtgcagaatggattatatgacactaaaagaggccgccgaaaaatggggcgtgacacctcgtagagtaaattactattgtgctgccgggcgtattcccggcgctgtgaagatggctggtatttggctgatcccaaagaacgcagaaaagccgattgacggaaggacaaaacaaggaaaggaattaaaacatgaatagaatattgctattggaggatgatgtcagtctaatagatggcttggtctactctttgaaaaagaatgaatttgatgttgaagttgcccgtacagtatgtgaagcaaaacaatacttatccgaactcgaccgatacgatttattgattttggatgttactctgccagatggaacaggatttgacgtatgcgaaagagtaagaaaagaaaatcagcagataccgattatattcctgactgcatcggatgaagaagtcagcataattcgtggattagatagcggtggggacgattatatcaccaagcctttcaaactgggggaattgtgttcccgcatccgggcgctgttgcgtcgggccggagtttccaaaagcgaaaaaaacacttctatggaatgtggcgacattaccattgatctgttgggtagtcgtgcaaccttaaagggaaaagcattggatttgacaagcgccgaatatcgtttgctttgtctgctggtaagaaacgcaaatcgcgttgtgacaagggacatcattctaaatgagctgtgggatgatacaggaaattttgttgatgataataccctgtccgtctatgtacggcggcttcgtgaaaaagtggaaaccaatccgtcccatccagaacaccttataaccattcgtgggttcggctaccaatggaaagaggtgtctatatgagtttgtaccaagatagacagattaaagggttcctgctatttttgactttgtttgctctgctgtttgtaggtacagcaaccgttttgactatttatcaggtgaacgatgcggaagtcctatggatcaaacatgatgaagcggtttcatcctcacttttggaacagggtgttccgaaagaagtggttgcagttgcctttacgaacacagacatcagtgacgatggtaggtcattattagcggctgcgggtttgggaaaacagtcagaaagcagtatgcggccttatttcaatcaatttcagcgttccgctttctgcaccatgctatgcactgtgctattttttctctttgtgcttgccataggaatatttatttttttctggaaaaggaagcgattgtatcaacaggtcgacagaatattgctaaattacatcaacggggattactcttgtcatttaccgcagaattatgagggggctatctaccaagtgttttcttcgatagaacagcttgcaactatgctccaatccaaaaatgaaacagaacgtaaagcaaaagagtttttgaaagacaccatatccgatatatctcaccagctcaaaacgcctctggcagccctcactatgtatcaggagatcattgaaagtgagccagaaaatgcagaaacggtcaaacagtttgcggcgaagatgggtatttctctaaagcgtatggagcagttaatcttatccatgttgaagataacccgactggatacgggaaacatcatttttgagaaaaaaagttgccgtgtgtccgagctgatagctcattcagtcaatgacctaaccaccagggctaaaagcgaaagcaagcagattcagatagatggcgatggtgaacagcagcttatttgtgacatggaatggacaggtgaagcgattggaaacattgtaaaaaatgcactggatcacacgcaagctggcggtattgtccgtattacatgggagcgcactcctgctatgtttcggatttttatttctgataatggtaacggcatagtcccggaagatatttaccatatctttaaacgcttttatcgcagcaaacattcccttgatacacaaggaatcgggctggggcttccccttgccaagtccattattgagggtcaaaacggtgttatctccgtacaaagtgaagtcggaaaaggtacgctgtttacactatctttccttacggatctgtaaggtcaaattcacctgcttgtaagctgtttttgctatccttttgagaaaggaggtaatgatgactatggaaatattgaaagtacaagatttatgtaaaacttatggcaagggtgaggcgaaagtcgaagcgttgaagaaggtttccttctccctggataaaggcgaatttgctgccgttgtgggtgaatccggttctggcaaaagcacattactgaactgtattggagctttggatacccctacttccggccacatttggattgatgaacaagacctgttttccatgaaagaggaacagcgcacgattttccgccgtcgtaatatcggctttatcttccaatcctttcagttggtttccgagctgaatgtggagcagaatatcatgtttccgcttcttttggactatcgcaaaccagacccggcagcagtagaagaaattttggaactcttgggacttaccgagcgtcgacatcacctgccgagccaactatccggcggacagcagcagcgtgttgccattggccgggcgttaatcacaaagcccaaactgattctggcagatgaacctactggcaatctggacagcaagaatagtcaggatgttatcgccctgcttacgcaggcgtcccgtcgctatcagcaaacaatcctgatgattacccacaataaggatttgactgcatccgttgatcgggtgttccgggtatcagatggcgttttgacggatttgggaggaaaaacaaatgaagcattatcttgaccttgttcccatatccgcaaaaatccacaagaagcaaagcagaatgtctattttctgcattgtgctggcggtatttctggttacaactatttttggaatggcagatatgttcatccgcagccagattttgcaggcacagcaggagtctgggaattggcatattgccattaagaatatcagcaatgaagaagcagcaattattgcttcacgccctgatattgaagtattttcaccgtatggcgtactcaattatcgtggagatttaggctacactttgggcggaaaagatgtagcgatatgcggttgtgatgaaagctatataactgaaatctggactgaccaacttgaagaaggtgtttttccacagacaagtaatgaagcgttggtgactgaaaatgcaaagcagataatgggtgttgcgattggtgatcccattgccgtagaaactcctgatggcgataaactgaattttaccatatcaggatttatgaataataccgcctcgatcatgagtggcgactcctacggcatcattttgaacacagaggattactgcgcgatttatccgaatgtatcagacggggagccgaatgattacggcattatgttttttactcaatttgcaaacacaagaaatatacaagggaaaattgcagatttgaaagaacaatgcaatttatcgaatgaacaaatatcttccaacaacaatctgcttggattgcttggacaaagccgcgttccctttttgttacaggtttacttggctgcggctgtattgtttgtactggtaatgttagctggtattatgatgattgcaagcagcctgaacagcaatgtagcccagcgtaccgaatttttcggccttatgcgctgtatcggtgcaacaccaaaacagattatgcgcttagtacggaaagaggcgcttagttggtgccgtttggcaatccctgtgggtatttccatcggtatagttgtcatttgggtcttatgtgcgattttgcgtttcctaagtccggaatttttcaaagcgatgtctacattcggatttagcgtaccaagtattcttgcaggaatcgttgtgggcttggtaacggttttgttcgctgcctattctccggcaaagaaagcagcaaaagtatctccgttggcagcggtttccggtaatgcaaacgacttggagcctgcaagaaatgctgctaatacacaactgcttaagattgatacagcacttggaatttatcatgcaaaagcaaatcggaaaaatctgtttttgatgacaagctcatttgctctcagtattatccttttcctttcattctctgtaacagttgagttcatgcagcataccttaacaccgctccaaccttggacagcagatttatctatcataagccctgataacgcctgtgctattgacaaagcattacttgatgatctaaaggaaaatcctgttgtggatttagcgtatggaagaaaatttgcatacgaggttccgtctgtcacaaacggtattgaaaaaaagatggatttaatctcttatgagcagtatcaatttgattgggcaaaggactatttattagagggttctctggaatctgtgcaaactgatttagggacgggcttaattgtttataattcgcagaacacaatacaaataggcgatactgtatcgttgaatacaaacggacaaagtaaagaaatccaaatcgtgggaatgttgtccgactgtccgttttacagtgccgccggtgttggaacaattatttgttcagaggatacatttgaacaaattactggcgagtcgaaatatacggttattgatgtgcagttagtgaaaggcacaacagacgaagatgtttatgtgatccgccaaatggtagattcctcatttactttcgctgatgaacgcatgggtaacagcagtaccatgggaacttactattgtttttggctgttcatctatggattcctcgtcctaattgcaatgattacaatttttaacataatcaatagtatttccatgagtgtgtctgcacggttgaaacagtatggcgctttccgtgctatcggcgttagcatgggacagctaagtaaaatgattgttgcagaagccttcacctataccataatcggcggtgtagttggtacggtgttgggactgttttgtaacaagctattgtttggaatgttgataagttatagatggggggatgcttggactcctccattaccagaggtagctgttattctgttgattgtcgtaagctctgtaattctggctgtgtatgggccaatcaagagaatacgcaatatgtccattgttgatacaatcagcgcacagtaattctacttttgaagcgggtggctttagaagccgcccacttttgtcttacaaattcgtaagttgaaattcacctgtttgtaagctgatttttttataattaagttgatgaaagagaggaaaaaatgaaaaaaatcctttccaccagagtattggtgaagatttgtgtattaacaactatactgctggttttgataatctatactatatggggcaattcagcattgatggtaagtatggttaatatctccagcgatcgcatagcatctgccttttctaattttcggattgcacaagtgtccgacttgcataatgctgaatttggagaaagcaatacagaattgatagaattgctgtctgaacacgaaccggatattattgtgataactggagatttaatcgatgctggacatacagacattgagattgcgtttgattttataaaacaagctgttcaaatagcccctgtctactttgtaactggaaaccacgaagctaacttctcacattatgatcaattcaaaacagggcttgaagcgtctggcgtaactgtccttgaagatgaagcaatacagttagtgcataacaacgaaatgattacccttatcgggctttctgattctgactttacgattaagggcgatatgtttaatgaagcgccagccatggtcaacacaaaattgaatagccttattgatgacgaaaacagttacactatactgctatcacatcggccagagttatttgaaacctatgtatgctgtggtgttgatttggttttatgtggtcatgcacacggagggcagtttcgattaccttttattggggggctcgttgcccccaatcaagggctgtttcctaaatatgattccggcctttatacaaacggaaagacaaatatggttgttagccgcggccttggaaatagtattattccattccgatttaataatcgtccagaggttgtattagtagaacttaacaccgaataacgatacttcaaccgaatattgaaatgatctgccgcacgacggcaaaagaaaaaaagccgtcgtagagcagacaatttgacacgcccatttgaaacggcggctttgattttcagagccgccgtttctttgcgtctacacaaaccaatgacgacttgcagggacacggtagccgattggaggttattttccgtgtccttttctctttttcgcagtatccatgatctgcaccagttaaaaaaagcatagcccctccatcgaagcagtccggctttgaatgtgaaattaaacagtacataaccgataatatattttcgtgcgcttgtgtggccttgtgtcgcgcaggcgtattttgctttccagacttcgagacaaagtgtcccgaggtgcggtgccgttctccgccattactccatttcgtttccgaccaaccccgaacaaactgaaatggaggattttacgatgactactatcaatctgaaagatctttattattggtacacgcaggatcagcttatcgaagtttctgacgaggttgccgaggtattcaaggccgatgcccgttatgaaatggcctaccagcggcggctctcccggcacaaggcgcagtattctctggactgcgatgacgggattgagtattccgcttgcctgcatgagccgaccccgcaggagctccttgaacggatggaaacctttcttcgtctgtggaacgctctcaattctctgccggagatccaaggccgtagaattgacgcacatatcattcttggcaagtcgattaaggaaattgccgaggccgagggcgtacatgaggagtctattcgccagtcgatcaagcgtggccttgaacgcatgaaaaaaactttttgattttttcttcttaacccacttggaattgatgaaaaaatgtctcggtttatgagaggaggttttcttcctaacgcaagggaataacggcaaccctgagtaagtacgtggagccagacggtgggtgcgcggtgacatttcccaaaagagattgagcgaacaacaccaacactgtaaatgggcccggccatcccaaggccatgatccggtgctgaacaggttggctgcctgttcctccgggcttgtcgctttacttgcgttgagagcgccgcacagaaaataacgattgtctttggacaggccaagtaaatatgtgcggcactctctaatattcaaaaactataataaacctcgagacaaagtggttttctaaaaaaaccgtcttgaaaaaagttcaggaaaaagccgtttctgccataaaatcgacaaagaccgggcagaaaaatcaaagccttttttcaaaataggcgtttgtcaacggctccaaagtgtcccaaggtggagtaaggcaacaggccagcatcccggtggtgctggcctgttgcgtttccccaccaaacagcgggaggcgttctatcaatctgcgaaggaggtttaccgtgaaattaactacacaggaacttgaacaaatgagaagcgttgacattggcgcggtggctgccgagtccctgcctgatgtgagcggtatgacctttgacaatgcgctttcccgaaaggagcgcatctctcgatttttgcagactgtcaaaaatccatactgcttttgcatcggtggtgttggcgtgaaaattgaatttgctgaaagcgggccatctctccaagataagctgacggatttcctgctgcggcaaagaagcgggctgtaacttcggttacagctcgttttgcttcttcgagacaaagtgtcccgaagtggaggcatccttgttgtcctccccggacagagttataatataagtgtaatgtgatagggaaggaggaacaatggcacgagcaaaaaacagagggtatcagcagagtttctctccctcttacacaatccgccgctggcggctgggcatctatatccggctttcaaaggaagatttgaaaaaaggaaaagacgatagcaacagcgtaaagaaccagcgtgacctactgaacgatttttaccgacgcaacattgacgagtttgaaagcatcacggaatatgtggatgatggtcatactggaacggacgccaaccgtgaagattttcaacggctcttggcggatgtcatgagtggtaaaatcaactgcgttatagtaaaagacctgtcccgcttcgcacgaaattatagcgatgccggaagtttgatcgataacctgtttgttcaaatgggtgttcgctttattagccttgctgagaatgtggacagctacaagaaccccgacagcgtttcaaatatcatcgttcccattacaaacgtgatgaacgataattactgctatcagacttccaaaaagatccggcaggtatttgattacaaacggcgcaacggccagtatatcggagcatttgctccttacggctatgtaaagcacccaaaggacaagcacaggctgattgttgatcccgatgctgctgaaaatgtcaaactcattttcacaatgcttattcaagggtcatcaaaacgtgctatcgcgctgtacctgaacgaacacggcgtaccgagcccctcggcttacaaggtacaaaagggcttgcctgtttcgacaagagggtatgacgatcctatgtggggagtccgcatgatccactccattcttaccaatccgacctacaccggggatttagcccaaggccgaagccgggtgaaaagctacaaggtacaccagattgaagctgttccacgcgaggaatgggtggaagtggctggaacgcatgaggccattatcgactatgaaactttcgacaaggtacaggctctcttacagcgtgatacccgtacttccccgaaaggccgtgaggtacatttattcagcggctttctgaaatgtgccgattgcgggcgggccattacccgatgcgttggcaagaacaacaatgtatattattcttgctcaacctacaagaaccgttcccggacagcctgcaccatgcactcaatcaagcatgaacggctggaggctgctgttttgttcgctgtacagcatcaggtacatttggctgtttcctactcggaaatcgtcacgcagatcaattccgctccaatcaaaaaaagccagtcttaccgactggacgatctgatagctgcaaaagagcgggaactgacaaagataacacgctacaagcaatctctttatcaggactggaaagacggtgaaatcacccagcaggaataccgggatatgaaggctgactatgaacggcagacttctgatatttccgcggtgcttacccggctgaacgctgaacgcgcagaactggcaaacggtgtggacaacgagcatcctgcactggtagcctttatgaagtatcagaacattgaagccctcaaccgtgaaatcttggttgaacttgtggactatatcaaggtctatgaaaacggcaatatcagcgtgaaattcaaatttgctgacgaactccgcaagattgccgaatacattgaaatcaacactacggaagataccgcagtagcgggctaacccccgctacgaacccctttgacagtgtgttttcctaataggcgctaatcatatgttggttaaattttaagtgagcagaaatcttacaattctgtaagacttctgctcgttttttgaaagtgaaatgaaagattatcctgatacaatttggatgtaggttgaaaaatgaccaattatataaacaggcaaagaaagtgtgctgaaaaggtacgctttacagaattgaaaaggaggcaacacatgagtgtgatattagaaaccaagcagctttgtaagttttatggcgcaggtgagaatcaggtcaaagcggtcaatcaggtggacattcagattgagcagggagaatttgtcgcaattgttggaaagtcaggttccggtaaaagtacattacttcatatgcttggagggctagacaccccgacaaaaggcagtgttactttagcagggaaagatttatacaggatgaaggaagatgcccttgctgttttccgcagaagaaaaatcggatttgtttttcaggcatttaatctggtttcatctgttaatgtctgggaaaatattgtactgccactggggctggatggaagaaaagtggatgaagcgtatgtaaatgatattattgcaactctgggaattgaaaagaggatttacaatctgccaaatcagttatccggaggacagcagcagagagtagcgattgcaagagcactggtgaatcgtccggaaattatatttgcggatgagccgacaggcaatcttgattctaagaccagtgatgaggtgattgccctgcttaagatgacagcaaaaaaatatggacagacaattgtaatgattacccatgatgacgaaattgcacaggtcgctgaccgtattctggtgattgaggacggacaggtggtggatttcagatgaagacaataagcaggattgcatatagcaatgacaaaaagaacaagacaagaagtatactgattatgatgtccatatgtctgaccacgatgctgcttgtgattatcagtactgtgggaaatggaatgatacgtttgcagaaaagtcaggcggcaggctcatatggaagcaattatggtctgtttgtttccgcagacgaatcgcagttaaaggaagtaagccgccgtgcagaaatagatgcaataggaattatgtgtacagaaggcataattaaaggcaatgaaaatggcgggtttgtctgcatggatgagactgcaagaaaaatgcttccctataataaggaatatgagttaaaggaaggaaagtatccggaaaaaatacaggaaattgccgccggaagagctttttttcgtgcaatgggatatgatgatgtaaaggtcggagatacggttacactggattaccgtgcagggatgcggtcagaatataagccggaagagtttgttgtcagcggaatcctatatgaccgggaggagtataccatcgaggcatcttatgttgctttcgggtcacaggagttttatgatgagcacgtcgcagagaatgacagacagtataatatctattttacgttaaacgattctgcaaatgtatctatgaataatattgaaccggttataaagcagattgcagcatcttgtggaatcgaagaaaaaaacgttatagtcaatgatctctatttgcaatgggtcttgcagccgagttatgaaacgattgcggtatgtggaattctgattcttgcaattgtacttttctctgttgtggtcatttataatatttttcaggtcggtattgtcaacaagatacaggagtatggaaaaatcaaggctctgggagcgacaaaaaagcagatgaaacaactaatcttcagagagggcatttttttgacaattttttcaataccggttggattgcttcttggttttctgattgcaaaatgcggttttaactggctggtagaacagggaaatcttgtatcaaccggaacgggctctatgggagtccaaaatcagcaggtgccactgttttccctgcctgttatacttctatgtattttcgtatcatttcttaccgttgctttggcactgcgcaaaccaatgaaaattgtttcacggatttcacctatcgaagcaacacggtatttagaaaatgcagaaacacacaaaaaaggaaaacgaaatggcagaaaaaatgtcaccgtgttttctatggcaatggcaaatataacgggtaatccaaaaagaaccattggtaccatcctcacactggggctttcctgcgcattgtttgtgattatctctaattatgtaggaaatattgatacggagcatgaagcacgtctttccgttaatcatggacaattggaactgcagcttgactattctgctgagtacgatgaaagatatccggagaataatctggatacgattctgacggataatccattgaatgattcgctgattgaagaaatcaaaagcattccgggcgtgacagatgtcatgacgagagagattgtctctgtaaatctgaacggaacaagatttccggctgctattgtgagtaaaaatgattttgattttatgcgccaggacggggatattggctctatggactatgatcaggcggtaaagaatggtgaaattttctttggctggtcgatgtggatggaacaagatggatatgctccgggtgaatccattgcatttgactttgagaatggaagtggaacctatacctatcagggaaagattgcgggatcctttgtaagcgcagacacttatcttgtcattccggaaggtgtataccgttccatgaatccgagaggaacagcctatggctatctgtgggtggactgtgataaaaaagatgtggcatctgtggaacagagtctgaatactttgatttctaatacttcgcatataaaaatggatacctatcatgcacagttacaatctgcagaattcgcagcccgcatgatgaagctcggctgttatctgtttatggcggttgtaggactcatcggttttatgaatatggcaaacaccataatcatgaatattacgacaaaaaagcaggaatatggtgtattacaggctgtgggtatgacaaataaacaattaaatttatgtctgcagttacagggaatgatgtttacggttggtaccatatgcgtagctttgatcattggtctgccgctcggctatgcacttttttcctatgcaaaacataatggaatatttggaatgaatatctatcatgttccaatcgtaccaattcttattatgatttttttggtcggcctattgcagattgtactttcctgcattttaagcagtaatctgaaaaaggaaacgctggtagaaagaataagatatcagggatagcaagtaatatgtaatgaactaggtcttaacgaagaggagaaatagataacttccattttgtatgtatgataaatctaaacagtattttagcaacagcctcttgctgtttataagttaatttctgccggagattttgatttaatgatttgatttataaaactggcaatgatacaattagcgtaatttgaaagaaagcagagaaaatatgagtgaaaagttactgattgttgaagatgacaaaaaattaaatgatggaatccgtctggctttaaaggatgatgcttatttcttttatcagtgccagactttgcaggaggctagagagatcttgaaaaaggaagatatcacattggttttgttagatgtgaacttgccggatgggaatgggattgattttgtaagagaaataaggaaaaacagtcaggtgccgattattctgcttacagtaaataacatggaagtagatattgtaacaggattggaagctggggcaaatgattatattacgaaaccgtttagcttgatggttttgcgtgcaagagtgtctgtgcagcttagaaataaagaggcagcagctaaaaattctatggagcttgatggatttgagttctatttcgataaaatggaatttttcaaagatggagaacctattgaacttagtaagacagaacaaaagctccttagagtgctgtgtgaaaacagaggaaaagtattgaaacgggaatatctgattgacgaggtatggcagggagatacagagtttgtggatgctcatgctctgactgttgcagtcaaacgcctcagagacaaattagaagatgatacgcagaagcctgaatatgtcaagacggtttatggaattggttatacatgggcggtgaatggatgatagaaacaattatgttgattgtagttatatttgtcctgagcggagttttttggtacagctttttttatcagaaagaaaaaaagctttttaaccggctacagcgaatgctggattgtgcaatagatggagaactggaacggacagaaatatcagaagaaaagtattctgctcttgaaaacagcatgaaacaatatatagacagtagttttctggcaaaaaaaaatcaacaggaacagaaagaagtgatacaaaaacttatttcagatattgcgcatcagacactgactcccatttcaaatctgaaagtctatggagaaatactctctgaagtgagtaatgaaaatcaagaggagatagctaccattttggagcagacggagaaattggattttctgatacaatcactggtcaaattatcacgaatggagagcggaattatagcagtacatccggaggatactgctattgcacagatgtttgcatccgtacagcagcagtttaatgtaaaagcaatggagaaggatatttccctgagtctatttgacacggatttacatgctatgtgtgatgcaaaatggaccgtggaggcactcggaaatattgtagacaatgcgattaaatacacagcatgtgggggaaatgttcagataaaagtcgagcagtattctttttttgtaaagattgatatcattgatgatggcattggaatagaaaaagaagaaataccaaagatatttggaagattttatcggagtctgtcagtggcagaccagccaggagtaggaattggcttattccttgcaagagagatcattcaggcacaaaaggggtatataaaagtgacatcaaagagaggaaagggttctacattttctgtgtttcttccgatagcaaagaaggaatagtatcaaaactgtgacatttcagaaaccagatggagacattgttatgataaagtctgtattgtaaagatcaatacaggcttttttgatgggaggatggcatgaatatattaaaagcagtaagtttacgaaaaatatatgggcagggagaaacagaagtcagggctcttgatggtataaacctggaagtagaaaaaggggagtttgtagcgattgttggaacctctggaagtggaaagtctacattgcttcatatcattggtggtttggataatccaacatccggtcaggtcattgttgacggacagaatttaagccatatgacagatgaagagcttactatttttaggcgtagaaatattggatttgtatttcaacagtataatctggttccgatgctgaatgtatgggaaaatattgttcttcctgtaaaactggatggaaaaaagattgaaaaaggttatgtaaatgaaatcatagatacactgggtattcggacaaaactggaaaatcttccaagtgcactgtcagggggtcagcagcaaagggtggcaatcgcaagagcattagcggcaaaacctgctattttgctggcagatgaaccgacaggcaatctggactcaaaaacgagtcaggatgtattgggacttttaaaagtcaccagtaagcgttttcatcaaacgattgtaatgattactcacaatgaggagattgcccagatggctgacaggattttacagattgaagacggaaaaattgtttcagacagtggtttggtatagtgagggcgattatatggtaaaagtagagaataaagaaacgttacgattattgacgaaacgttttatgaaaatgaaccgagcaagaaatattattgctgttattgcaatcatgttgacatcactgttatttacaagcctctttgtggggagtgtatccatgatactttccaaaagagcaacggaaattaagcaatttatggattcatcccatgctattgcgcagaatttgtcagaagaagatgcggagagattgcaaaaaacaatagaacaggatgaagatgtggaacgatatggttccggtatttttctgggagctggaatggacgaacggtttggattttccgtagaggtccgatatgcagatgaaaatatggcagaaagttttaattgtctgccaactacaggaagactgccagagaaagaaaatgaagtagcacttagtagcacgatattggaatctttgggtgttacaccaaagattggggaagaagtaacgctgacctgggaagtaaatcctatgctgaaacaatataagacagatacgtttcagatatgtggattttggcagggggataaagctgttttaggtcagatggtctgggtatccgaagcctatgcaaaggagaatcgttatcccgttacgcaggaagaattagaaaatggcatctacaatggagggaaagagtattctgtctggtacaagaacctttggaatctggaaaagaaaacggaaaagatatccaaagcagcgggatttacgaaagctgggacaggaatggaagtcaatccggcatataatctctttgaagaggattcattttcattctcttctttaattataatgattctatttgtcatattagctggatacctgattatttataatatttttaacatttctgtgaaaacggatatccgggcttacggattgttaaagaatgtggggacaacgggaaagcagttgaagaaaattgtacgtatgcaggcgtggagattatcagctattggcattccaatcggattgctttgtggttatcttgcaggtctttgtatggctccgtccttgactgcagatgcccaaattagtgcacaggcaggaaaaacggttcagacagtagtatcagcaaatcctttgattttccttgcagcgatacttttaacgcttttaacggtgtatctctccagtctgcaggcttgtaaaatggtggaaagagtttcgcctgtggaagctctgcgtttggcagaaggagagcagtcacataggaaaataaaaaagaatacttctgtaacctggtgggggatggcagttcaaaatgtgttacgaaattggaaaaagggattgattgttatgctttctatcgctctttctatggtggttgtcaactgtatcgtgatgttggtgcagggatatgattttgattcttaccgaaaagtatttttagcttccgattttcaactggatcagatgacgggaagtttgtcaaatacgaatttcaacggtattacacctgaaatcaaagagattttggacgaatgtcctgatagtgctaagacaggatatgtgtattattctgaagaaacccacaagatggagccggaacttctgaaaacatgggaagcattcgcagataaatatgaaaaaaactggactgattatgaagaacaggtttgggaagatgcaaaggcttccaatacagtaagtgttcattttctcggaatcagcgagtcggtgtttgacaaattagaatggagaggggaaaaatgctcttgggatacatttaaaagcggaaattatgtgcttgtagattatggtgataaatatgcagagcatccggtttcttattatcagactggggatgtttttcagatggagtacaaaaatggaaaccaaaaagattacgaagtcattggagaagcactgatgccatatgcattggattatccgtatgcagaccttatctatattacggtattagttccagaagatgagtatattacccagacgggaaatgaatcagccatgtatgctgccatcgatgcaaagaagggcgaggacaagcagataaaagaatacattgataaaaatattttgaaagaaaatgatatgatcaatgtgttttctgtattggacatgaaagagagttttcagcagtttgtcagcaaatattatatgatcggtggttttcttgtcgttattttagcatttatcggtattatgaatttctttaatacaacagcaacctctgtaatcagcaggaaaaaggaactggcgcttttggaagttgttggaatgacgaaaaaacaggtatcgaaaatgctagtgactgagggatttctatatttgggaggcgcatttgtgattgcagtattattagttgtgtttggggcagagaagattttagcaaatacactcggtacggcatttttcttccggctgcatcttacgatagtgccatgtgtgcttatgattccgattttggttgggattgcgtatgtgataccaaagtatcagtttgaaaagatgagtcgggaaagcattgttgaaagaattcggaaagaataataacaatgtgtaaattaggcgtatggatccaatccatgcgccttttttagaaaattacaattctatatcatatgattttttcttagtccgagcaggctgatttcgttgcatctcctgtttcctctgatattcaagttcccaggcacgatgggaaaaacatcaggatcttccacattgagataatctacctcattggcggcaatatcacggcggtgatagtcataatacttacctaaaagtacctttgagctgctctttccgttctgtaactttagctttgagtttctttttaacggtgttgtatttattcagtattggattaaaattctattaacacaagaggagtttggcaaattatttcatgttaccaggcaaactgtttcaaattgggaaaacggaaaaagttatcctgatttgcaaatccttgtaagcatgagtaatcaatttagctcgcacccagtgctctttaagataaagtagaaatagtgcaattttcacatgatattatacaagaattacatagaaatatatcgtattattgatatagtattcttgaattgtatgtgaggagaaaaactatggcagcggaaagaaaaacattaacacagctatctgtgccaatatgcttagaaactttattttatatgctttcaggtatggttgatacgcttatgctatcatctgtaagtgatcaggctgtaggagcagtgggaacagcaaatacatatataagtgtttttattattatgtttggagtaatatcatcgggtatgatagccgttatgtcacaaaatatcggagctggaagaccggggatagcatatcaggcaaggcaacttggacttatattcaacgcattgataggtatcgtaatgtctgtcgttcttgctactttttctggtgggatacttagaagcgtaagtattgctccggctttgcttgagccggctgaaatatatcttagaattgttggcggcacatgttttttaaatgcactgattcctattttctccagttatttgagagtgtttggatatacaaaacattctttgataggaactgttgttggaaatgttctcaatataatacttaattcagtatttttatttgcattcaactggggtgtgatgggagttgctgttgccacggttatttcaagagttgtaaatcttattattgtagcaggtatgggggctgtgcttataaaagcaaaacagagtcctgagcgaattgcatcaagaaagatatttgcgcagattgttaagattggttttccttctgcgcttgaaacagcactttacaacatcgcaatgacctttattgtgcgttttatgaatcagatggatgtggatggaatgaatgttacagcgcgttcatatgcgatacagattgcaaatttctcgtattgcgtgggagctgcccttgctcaggcaaatgcaattatgaccggctggagaattggagcaaaagagtttgaggaatgtaacagggggacgagaaaagctgcgatatatggtatcatcacagcgacatgtttttccgtgacctttgcatttgccggacattttatcgtgcatatatttacggatgatatacagatgataaatcttgtggtaaagttgttaatagtagatatatttcttgaacttggaagggtaacaaaccttgtatatgggcaggcgttaaaaacgagcggagacgcattttttccggttatattaggtgcgatatttatgtatttgtttgcagttggcggaacctattttctcggaatacacatgggacttctggctgtaggagcatatattgctatggcaggtgacgaatgtgcgagagcagtgggaatggtacttagatggaagagtggaaaatggaagagtaaaggtcttgtagaagtataggagagagtatgtactttgaattaaaggaaaataaaccacatggtacaaaggatgatccgtttagtacatatcatataaaaaatgaaggacgatcatttcagataccggttcattggcatgatgaactggaaattatatatgtaaaaagcggttttttgactgttagtatatcaggagaaaattatattggaacccccggggatgcttttgtagtgtcgccgggtaatctgcattttatgggttcacagactgatacagtggattattttactttcctttttccgttaaaatacatatctttttgcataaatgacatgttggatgataaattattggagccgttaaaaaatggtcatctgatgataagtccaagagtaaaagatacagcaaaagaactatgtgagcagttggttgaaatatatgtggcaaaaaataagaaaactgagtccataataactgctcagataaagacaaaaataattcttttacagtttattcttgaaatgtgggagaagggctttgtaattgaaaatgataaaagcgggagaaatacgatagaaaaagaaatgatttcatatatacagcagaattttatggaaaagatatcattaaaagaatttagtgagcagtttcatctttcggaaaaatatatatcgcgatattttaaggaacattttcatattaccctttcgcaatatataacacatttaaggttagagcatgcaaaacagctgttacaagatacggatattcctgttacagagattgcaatgcagagtggatatcagaatgtaagctattttatcagaagcttcaaaaaaacatatggagtttctccgttaaaatatagaaaaaaataagccaggtatatggttagaaaggagaggatatgcatatcttaccagtattatggatctatatttcagaaaaatcatttcctgggtactaagtgagacgttggaggcatctcatgtagtaaaatgttcggtttttacaacagtctgtttcgtgtgtagtttatcatcgtgatcacaatgaaggcgtgccgggatgtttcttttcgaaagaagcagaagcaacttatgatcgcagtattaaagcattggcgaaggatcacggtatcatttaatatgtgttttaatctttattcccccctgtgtgtatgataaaatagtaacaggaattttatcgacagacagggggaaaaattatgtcaaaaattgtgaatgaaccaaagatcaaaaacaagtttgtagtcaaaatcagagagcttttagagcaccgtgcgttctggctttatctcttggtggacgaggcagaaagccggatgtagtgacgaagagattgcaagattatgtgatattgcaatgtgtggagatcatggaatcggaaaatgctttggcattcgactatttcaatgagaatcagatcagttttgagtggatcgtggatgaaggcggtgccgtgattcgattcgctccaatcgatatagataaacagcaatacgcatctgtgcacggagaaaatgaaaatatatctgtggaagagattcatctgatggtggatttttatagaaaattgattggaaaatataagtaataagtggagagaaaatgttaaatattatagaaatcaacaactttaacgcaccggaactggacgtctacgcacgttatacggaagcacagcttctgaataaagaccgtccggaagatggactttttattgcagaaagtccgaaagtgattggacgggcgttggatgccggatatattccaatatctgttctggttgaaaagaaacagatggaagaaaatgaagagacgcaagaagttcttgcaagatttgagaatacaggcacttctatttttacagcagagtttgctgtccttacgcaattgacaggattcaagctgacgaggggaatgctttgtgcattgaaacgccgaccactggaagatttcaggaaactttgcgagggaaagaacaggattgccattctggaagacgtgatgaatccaacgaatgtcggagcaatctttcgatcggcagcagcgatgcatatggatgcggtattactgacttcaggatgcagcaatccattgtatcgaagagcatccagagtaagtatgggaacggtgttccagattccatggacatttattcaagacgataaagaacgcagatgcgacaggaaagagatctggccggtccaggcaatcgaaagcctgaaagcacttgggtataagacagcagcacttgcattaaccgatgattccttaagtattgatgatacgcagcttatgagtgaagaaaaactggcagtgattcttggaacagagggggacggacttatgcaggagacaattaaagcttgcgattatactgtgaagattccgatgtcacatggtgtagattctctgaatgtggcagcagcaagtgcagtggcgttctggcagttgagaaaataaaaatttagcgtagagattcttgtttgagtgcggacgaaaactgaaaatattattttagaaagtcgcttgttagaagaatggtacaggaacgccgactcagggttacgcatactgttcatactaggaaaaacaacagactgctaagagcaaagaaaggattgacaaactcgctgccgctcagacagctgtcaatcctttctttaacgcaatccattgtttttcaagtatgagcaagcatgctccacattcgtcttcgtccctgtaccatccttctaacatgaaacttctcgaagttcatattttctgttttctgtttactgaaaaagaatccctacgacaaatctttatttcccggcaatttatagaggaaattccctcatcatttcctcacaaaaagaacaatgtcatataaaatgttacatttttcacaaaagaaacttctttggtgtaaagtttttgtaaaacaagtgtcttgtcacctgtaaacgacagtgttataatgggcaagaataaatcaacagagcaatagacatgaaagtgtgttacagcagaattttatgtcaggagagaataagagaggtacgtgctatgacgatcagagaagagatagaacagttaaagaaagaaaaaaatgccgtaattctggcgcattattatgtaagaccggaagttcaggagattgcagattatgtaggagattctttctatttaagcaaagttgcggttggtctgaaagagaaaacaatcgtgttctgcggtgtttcattcatgggcgagagtgcgaagatcctgaatcctgagaaaacagtgcttatgccggatatggcagcagattgtccaatggcacatatggcatctgcggagacaatcgagaagattcgttcagagtatgatgatcttgcagttgtctgctacattaattcaacagcagaactgaaaagacattctgatgtctgtgtaacttcatccaatgcggtgaagattgtaaaagcacttccgaataaaaatattttctttataccggatcgtaaccttgcacattatattgcaggattggttccggaaaagaacttcatatataatgaaggcttctgtatcgtacacgaatacatggaggttgaagagattcaggaagcgaaagcagcacatccggaagcagaggttctttctcatccagaatgtccggcaaaggttctggaactttctgattttgtcggaagtacttcagaaattattgcgcaggcaggaaaatcagatgcgaaagaatttatcatctgtacagaaagtggtgttttgtatgaacttcagaagagaaatcctgagaagaaattttactttacagagacaactccaatctgcagaaatatgaagaaggttacacttgagaaagtgcttcatgtattaaagacaggcgagaatgaagtttttgtagacgataagcttcgtgaagaatctaagaaaccgttagagagaatgttagaactggccaagtaaacagagggcagataggattgacagcaatcgaagatcaaagaaaaataatgagatcaaatcgacagtcgctgtcggaatggagatatttattatgaaaatggaagcagatgtagtcattgtcggaacaggtgtgggagggcttttcagcgcactgagtcttccgagagatcagaagatcatcatgattacaaagtcagatttagagagcagtgattcattcctggctcagggaggaatctgcatgctgcatgacaaagatgactatgacagttattttgaagatacaatgaaagcgggacattatgagaacagaaaagaatctgttgatcttatgatccgcagctcaagagagatcattcatgacctgattggctatggtgtagatttccaaaaacaggaggcagatgagtctggaaatgaagccgcagacaacggtggtgaaaaggcagagattcaggatatttatgcatttactcgtgagggagcacattcacgtccgagaattctgtttcatgcagatattacaggaaaagaaatcacaagtaaactgcttgcacaggtaaagcagctttctaatgtaacattgattgaatatacaacaatgacagatatcattgtggaaaatgatgaatgtagaggaatcattgcacaggataaagatggaaatgaattcgaaatccatacagagaatacaatctgggcaagcggtggaatcggtggacgctataagcattctacaaatttcccacatctgacaggagatgcacttactatttccgaaaaacacggaatccgtttagagcatttagattatgtacagatccatccaacaacattgtattccaagaaaccaggaagacgctttcttatttcagagtctgtccgtggggaaggtgcagttcttcttaacagcaagaaagaacgtttcgtaaatgaacttcttccaagagatgttgtgactaaagcaattcgagaagagatggaaaaggaaggcacagatcatgtctggctgtccatggaaaaacttggaaaagaaaccatcatgggtcatttcccgaacatttatcagcattgtctggaagagggatatgatgtgacaaaagaatgtatcccggttgttccggcacagcattatttcatgggtggtgtatgggttgactcagacagcaaaacatccatggaacatttgtatgcagtaggagagacaagctgcaacggtgtacatggtgcgaaccgtctggcaagtaattcacttctggaaagccttgtatttgccaaacgtgcggcaaataaaatctcaggtacagagaatgaagtaaaagtacgtgaattggcataataatagtgatataatattaatctatgctgaaaaaataaaagttaagagaagagtagagaaagaatatagagacagggacaggagatataaagatgaacgaaattacaatgacacttcaggcagatcatttgatccttgaagcactcaaagaagatatttcaagcgaagacgtaacaacaaattcagttatgaaagattatgtaaaaggtgaagtagaactgatctgtaaacaggacggagtaattgccggactggaagtttaccgtagagtatttgaactgttagatgcagatacaaagacagaactttactgtaaagacggagacgaagtaaagaacggccagttgatgggaaaagtaacaggagatatccgtgtacttctttccggtgagcgtgtagcactgaactaccttcagagaatgagtggaatcgcaacttatacacattccgttgcaggacttcttgaaggaagcaaaacaaaacttcttgatacaagaaaaacaacacctaatatgagaatcttcgagaaatatgcagttcgtgttggtggcggttataaccacagatataatctttctgatggagtactcctgaaagacaatcacatcggagctgcaggaagcgtaaagaaagctgtcgagatggcaaaagactacgcaccatttgtaagaaagatcgaagtagaagttgagaatcttgagatggtaaaagaagcagtagaagccggagcagatatcatcatgcttgataatatgtcaacagaagagatgcaggaagcaatcaagatcattgacggaagagcggagacggagtgttccggaaatgtaacaaaagagaacatcggacgcctgacagctcttggcgtagactatatttccagtggagccctgacacattccgctccgattcttgatatctcgatgaaaaaccttcatgctgtagagtaaaagtgatataattgttaaagaacaattattagtatggatttcaatttagaaaggaagaggcatgatgacaggaccagaaagaagaactgccattataaatcagataaagacaagctcagcaccggtgccgggaaaggcattggctgcacagtatgaagtaagccgtcaggtgatcgtgcaggatatcgcactcatccgtgccgcaggacatgacattatatctacaaacagaggatatattttgcacgaatcacatttagtagaaagaatcttcaaagtgaaacataccgatgaccaggttgaagatgaactctatacaatcgtagatcttggtggaagagttcgtaatgtgatggtgaatcacagagtctacggtcatatggaagccgcactcaatatcaattccagacgaaatgcagcagagttcatagatgatatccgaagtggaaagtctacgccactgaaaaatatcacatccgattatcattatcatgtggtagaagcagatagtgaaaatacattggatatgattcaagaagcactggaagaaaaaggatttttgctggagcaagaagagtgggagaaagagctttttgcaaagtaaagatttatcgtagggattctttttcgagtgcggacgaaatcagatagcgcttataaagtttcttctaatagacagccattgagggattgatgcaggctccgggttctgtatacaggaaagactaagaaaaacgaaagattactaaaaacaaagcaatgctcggcaaactcgctgccgcttcagacagctgcctcgcattgctttaacgtaaccttccgtttttcaagtctttccaagcacacagaacagtcacctgaatcaatccctcaatgtctgtctatcggtaagttttcagtgctatctgatttctgctctctcgaaagaagaactctacttgagaagtagacgcaccggatgttctatagaatgatacccatttcttaagcgtatttactttaataaaatttagcgtagaagacgatcctttttcagtaaacagaaaacagaaaatatgaacttcgagaagtttatgttagaaggatggtacagggacgaagacgaatgtggagcatgcttgctcatacttgaaaaacaatggattgcgttaaagaaaggattgacaactgtctgagcggcagcgagtttgtcaatcctttctttgcttttagcagtctgttgtttttcctagtatgaacagtatgcgtaaccctgagtcggcgttcctgtaccatccttctaacaagcgactttctaaaataatattttcagttttcgtcctcatatccgaaaaatgatttctacgataaatctttatttcgtcccctatatcccttgacatctccctttttattctgcaaaatagtaagaagagtctttcgagattctactttattatataagaaaaagaggtcatttatatggaagaaatcatacagtttttagctgggattttgaatagagagtttattcgtgcagtgtttagtaacccgcgagtaaaggataatgtagttaaggcaaagcttcgaccgatggaacagaagggggagcttttatttcagttagagtctttcacaaagacgcaggcatttcataagaatctgacggtagaagagacaaaagatgagcttgcgaaattgttggaagagtttcgtcaggttcaggttgagacggtgagtgaggatatcacggtattgatcagtaagaaagggaaagcaacgattaagagaaagcgcaagaaggtccaggcgaaagctgcggatctgtctcataacaggaagaaaaaatatattttggaagaagggattgtggttccgtttcttcaggatcttggagttatgacacaggatggaaagattgtgaggacgaagatggataagttccgtcagatcaatcgttttctggaatttgttgaggacattctgccgcagcttgacaaggacagagagcttacacttctggactttggatgtggaaaatcatatcttacatttgcaatgtattattatttacacgagttaaaaggatatgatattcgtattatcggattagatctgaagacagatgtgattctgcattgtaatgaactggcaaagaagtatggatatgagaagttgacattccttgttggagatattgcggattatgaaggtgtggatcaggttgacatggttgtgacgcttcatgcgtgtgatacagctacagattatgcacttgcgaaagcggttggctggaatgcgaaagtgattttgtctgttccatgttgtcagcatgaggtgaacaagcagtttgaaaagcagagaaatctgcattcaggcaagatgaaattgaagacggaagttatgggagtttcagaaatgctgggagatcaactagcttccatggaagaagtgctcggaccaattatggattatggattgttgcgagagcgttttgcagcacttgtgacagatggacttagagcaaagcgtctggaaagcgagggatatgaaactcaggtattagaatttattgatatggagcatacgccgaagaatattctgctgcgtgcagtgaaaaaggggagtcctgcagcaaagagcagaaaagaggcagaggattgtgaaagatttttgaagattcagccaacattaggtatgcttctggcagagcaaaagggagataaataatgaaaaaaagggtaataaagattgccgcactggttgttctttttgcggctgtgctggtgatcagtaatgtgatactgaaccgtggaaatgatgatcaggttgtggatatgggagatgccacgttacctagagtctcatttatgatggggggacagaagataaatgcgttgtctggttatgtagatgatatggatattgccgcaatgcgagataccattacaccattagagagtgatggtacactgaagatgcagattgagaaaaatgataaccagatccgggagatcagttacagtgtatattctctggatggaacagagacatatgataaaggaactctaaagtctgcagaaagcgaagatgtcacattaaagctggggaaatcacttggagataaaatccaggaggcagtacttcaggtttcgcttgtgatcggcgaggagaaagagacaaggaaagttaatttttatacaagaattgagaaagcagatgatattacagcatcacaatgtcttacatttgcacaggattttcatacgaaagcatttaataagacggatgtagattcattgaatatttatctggaacctggagatgagagtgataatacaacttatcagacagtcaatatccattcagatatttctcatattcagtgggggactatgcaaccacagttgcttggtgatgtgcgttggagtataaaggaaagtaatagtgtgtatacctctctccttgcgaattacagagtttcctgcgtggatgatgccggtgaaaatgcagtgtatgacattaaggaatttttccgtgtgagaatcgcaggaactacaatttacctgttggattacaatcgtgatatgcaggaagtattcagtgagaatagaagtgtgatcgatgaagacggaattttgctcggcgttacaccttcagatgttccgtatgagacaaatgagaaagaaacgattgcagcatttgtggagtccagaaacctttggatgtacaataagagttcgaatgaattattaaatattttcggatttgcagatgcagatacgacagatgaaaggaatctgaatgatcaacatgcagttcgtatcatcagtatggacaacagtggtaatcttgcatttgctgtgtatggatatatgaatcgtggcgaacacgaaggagaagtcggtgtcggaatctattattttgatgtagagagaaatctgatccaggagaaagcatttataccaagtaagaagtcctatgcaatcgcagcggatgaacttggcaagatggtttattataatcatgcggaagagcagttatatgttttggcagacggaactttgtatcaggtagatttgaaaaagaataaacagacaacacttgcagagaatcttaaagaaggacagtatgcggtttctgatgatggacatctgatggcatatcagtcagaaggggataagagtggcggaacagtgattcaggtaatgaatctaagcagtctggagacgaatactgttgaggcagcaagcggagaaaaaattagtccacttggatttgtcaatggtgactttatttatggaaaaatgaaatctgaggatgcaggaaagaaagcttctggagaatcgatcactccaatgtatgaactggaaatccgtaattctaagaacaaaaaagttgccagctattcctttgttgataaaggcatttatatttctgatattttaattgatgacaatatggtaacactgaatcgtgtagagaaaagcggggatatttacaacgttacttcacaggagtttattacgaataatgaggaacgcaaagatacggcgattaaaacagaagtatatacaacagcactgatggaaaaacagatgcggattacatttgcagagggagcaggagataagagcgtgaaagtgatccgaccgaatcagctggcatcaaagaacgaacttgagatggttcttgctgatagaagcgaaagtgtgaaatactatgtctatggggtcggtgaactggcaggaatttacgataaagcttcttatgctattcagaaagcacagcagatttcaggagttgtgatctcttctgaccagaaatatgtctgggagaaaggaaatcgagatcttgcgtattcgatagaggatgttgctctttcgaaagaaggagaagagacatcacttgaagcatgtgagcgttatatgaagacatatgatgctcagaaagtagatttgacaggatgtacgctggatcaggtactctacgtgatcaatagaggatgtccggtgattgcacttacaagtgcagatcatgcaattcttctgacaggatatacgaagaatgatattacttatatcgatcctgaaaatggagagtcgcaaacagtttccatcagcgagatggaaggaatggtttccggaagcggaaatacatttattggttatatcaaatagaatatgtaactgttcagagccaagcaaaatttcaaaaacaggtataaaatgcttgcatttttaaaactgtttttgaaattttatttggcggatacgccacaccgacgaaatgcgtagcattttggaggttggctctgaacagttactagaaaatgaaataaaaacgacaggttcttcaatagttcaaatgaagatcctgtcgtttttaggttacataagaaaaatctataaagcttttttaaagataattcctcgatatttgttaagtgctccgtaaagaatcagaccaagcacaccggcggaaatcacttctccgacaccaactgtcagcatcatgaaaggaatcggaagtggaaccatataagcgtattttaatacaaatggaaccacgatgatgttggcaacaaccggaggaacaggggcaaggaatttgctcttgtttcttaaagaccatgtaaagatggcaccaatcagtgttgcaaggctgccgaagataatgtcaggcaggatcgcacctccaagtgtgtttccgatgaggcatcctacaaacaatccagggattgcagccggagtaaataccgggaggatcgtcagtgcttccgcaaaacggatctgcacctctccaaaagccagtgatgcaccgacaacagtcagtacgacatagatggcagcaatcatggctgcctgtgccaggtaaagcactttgttacttgagtttttcattattcagttctcctttagttttgttttacgagtggaaggtcacgaacactcgattcattttcgcgcagcaatgagtcaggcggccatgcttgcatggacatttgacgaatgccgcggaaggcatatacagtaagtatatgaccttacgccggaaatcggcgaaacccttgtaagaccttggttttttagggttttgtaacgggtgatagtatagcatgaaaagacaagaaaagcaaggacatacccactttctattaaaattgcatattgtattgttaaattgcatatgctataatgccagtaggcaaaaagataatgctattccatagtgaacagcaacgaaaaaccctcggagtgccatccgagggtttttctattcctaattcttgtgtggaaaggtttgaatccacaggctagttaccggctatttgtcgccatctaaccatttgatgatgtagtggcaaactacaccagccgcaacagcgacaataaaagataatgctaaatccatggtgaacacctccgttctgtaccagtataggaggcggtaacattgctagtatatcatatgttgctttgtggttctataattttgtgtcctatatatagtttttatcttaatgaaaacttaagtttaattaagaagtctaaatctactgtaaccaggccggatatgatagactatgagttgtgtaaaatacaattcatggaggaaaaaatgagtagaatatacaacgccctgatcgaacttgttgcagcagcagtttttataattccgctttggggtatatatgagaagtttttctttcagagctggaaacgaacgatggtttatatgatctttggattttatctggcagtagtattagcattagtgggatttccgaatatcacgatgttgcaaacggagtttacagtgaatctgattccatttatttatatgttgtcagattttgttaatgcgtgtttgaacgtactcttgttcgttccgtttggtttctttttaccaatgttatggaaagaattcagaaatataaaaagtgttgctttggcaggaattgttgcaacgtcttttgttgagatttctcaactttttactggcagagcaactgatatagatgatatcattacaaatagcatcggtactttgatcggctactttactgtgcgttttgtaaccgaaaactttacaaagcgaactttatcagattcaaaaattaatgatttttatttgatctgtggttcagtaggtgttattatgttttttttacagccatttgtctcaacatggttatggggaatacttttatgataagcccggatatcagtttcaataaggagtgaacgaacatgacattacagcaattaacctatttagttacggttgcggattgtgggaatattacggaggctgcagaaaagctttttatttcacagccgtcgcttagtgcagcaattcataatcttgaaaaagagatgggagtgactgcatttacaaggtctaacaaaggcgttactgttacaagagaaggcgaagagctattgtcctttgcaaggatgctcttagagcaggctgacaatatgaaagaacattttggaaatggagagagaagaacaccgaagttttctgtgtcttgtcagcattattcatttgcggtaaatgcttttgttgatctgatcaaagaatatgatgcagaccagtatagttttattataagagagacacagacgggcgagatcattgaagatgtggcaagcggaaaaagtgagattggggttctttatctttcggaacacaatgaagatgtgattctgaagctgataaagaataatcagttgaaatttgaggaaatgtttgttgcagaaccgcatgtatttatctgtaaagatcatccactggcagagaaagaaatgatttctatggaagatttacagccatatccgtatcttgtctatgaacagggaaataataattcgttttatttttcagaagaatttataagtatgcttgattttccgaagagtatacaggtaagagacagggcaaccttatttaacctggtgatcggattaaacggattcacagtaagcagtggtgtgatcgaccagaaattaaatggaagcagtattatagcgaagccattagatgttgataaaacgatgaggatcggtattattaaaaagaaaaatattattttcagtcgttatgcatcttattatgtagatgcgctgaaaaagcatttgtaaaaaataaagagcagggatttcgtcataatgaaatccctgctccttcttttactagcagaagaattcttttgcagctcgtaccagatactctgtatctttcacacctgcagtctcataaggggaatgcattgccaactgcggaagtccgatgtcaacggtattgagcgcaacctgagtgttggaaatatttccaagggtagagccaccggccatatcagaacggtttgtaaatgtctgaaccggaacatctgcccgcttacataggtcgcggaacatggcagcagatacggcgtccgtacagtacttctggtttgcattgaatttcaacacgattccttcgttcaggtaaggacggtttgtcggatctgctttctctgtatagtttggatgaaccgcatgagcattatccgcagagatcataaaactgtctgcaagatggacacgataatcttctccatcatatccaagtgcttcgtgaacacggatcagtgtgtcaaaaaggaacgtggatgcggcgccctgtttcgtaccgcttccaacttcttcattatccagaacacagtgtacagccatacattcttttttctcaccagaaagaaaaccttgaagtgatgcaaaggcacactgcaggtcatcaagtctgccgctggaaatgaattcttcagaagccccccagatggaaccttcctgtcggttataaaggaatagatcatgaccgagaatttcatctttttctaccccggcagcttcagcaatctgttccataaaagttcctttaggagaaccgcagccataaagtgggagaagatctttctgtgcgttgtagttgtaaccgctattgatctcacggttcatgtgaatcgcgagattcgggatcataacaagatcccggtcaatattgacgagtttgctcgtgaattgtccgtttgtcttatcttttattataacgcgtccggcaacagagagcggacggtcaaaccagggtgcacagagcatgccaccatatttttctacatttaatttcacataatgtttttctacttcgatctccggattctctttgatcttaaaggtcggagaatcactatgacttgtcagaatgtgcatcttgtcaataccattttccggaattgtaaacgcaatcagggaagagtcatttcgtgtaacaaaatagtgtttgccgcattctatattccaacgctgattttcctttagttcagtaaaatcaactgcaagaagctctgatctcatctgttgaactgcatgaaacgctgtgggactcttttgaagaaattttaatagttcttgagaaactgaattgttcatagatatttccttctttcaaattgttttaaaaatctttttttgctgatatatttactttttaggatagggcaaatcagagagaaatacaaggcggaaaagcataataaaaactttttatttaagaagaatttcacaacatactgttttaaaatgtgctataatctaatttggaatgtcagagattccattggaggagtacgaatgaaaaaaatatctttgaaaataaaattaacactaaaatatacagggtgcatattcgtggcaacaggcattgcgttgtttcttgctacagtgataagtggaacagatgcgcagtcagcaaaagcgatggcgaaggtggtacttccaatcgttttcatcgcatctcttgcaattggatactttctggtaagagaggttctgaaacggactgcagatatggcagagtcagcggcggaaatctgtagaacaaaagatttctccagacagttggaactggaagaatctgatgcggaattggagagactgcagctgacattgaatgaattacttgaggatgtgcgcgaggagggacattttgcagaaaatgttgtacaggagatgtggatgccggtcagtgtgattcttacacgaagcgcatggtgccttggcgactggagactgtcccagcgtcagcgctggcagattgaactggtgcagaaaaaggcacagattctttcagattttattcaggaagtctcattttttgcaaaggcagatcagggatgccagccggcttataaaaaacgcatgaatatcagtgaactgacaacaggaattatagaaggtcagatcagcagacttcaggaggcagatgaaccggtgcagatagactatgagattgaaccggagatctacgcagaagtggatgagaactgttatcggaagatgttgttaaatctgctggagaattccattgattatagccgggagattggactgatcaaagttgttgttgaaagcaaaggcagtgaatttacctgtaagattgcagatgcgggaattggaatttcggagacggatctgccgcacgtatgggatcggtttttcagaggagatcctttaggtgccggagaaggtcattttggactgggactttctgttgtaaaatggattgctgaagtacacgatggatgggtggatgcagaaagtatcctgggatccggaagctgctttacagtggggatgccgtgtgaaccgaagccagaggcagaagtagaagaagtgtcagaggaagagaagacagttgatgcgctgttagaaggaattaatggaacagacgaaatagaagaggagaaggatgcagatctgactacagaagcagaaggagcagttgagacagatgcaactacagaagaagctgagacagatgtaacatctgaaataaatgaaacggctgagacagaaggaattacagaaataaatacggcgactgaaacagaggcagtgaccgaaaacagagatagctcagaagagtccgaagctttgggtgagacaatcgcgatgcctgtgattacagaggacacagaggaagagtcatcagagaattttgtgccggatgcagagaaagatgaaaccgatgtaaagggtgaaaattcgtttaggaaaatcaaaatttgtttatcaaaaatcaaaagctttcttgaggaagaagatgacgaagaagatgacgaagaagattcagacgaagacgaagaagctttaaatgaatgcgaagtgattccatttaaaagcaaagaggattcagacgaaaaataaagaggaggacttctgacgtgaaagacgtagcaacaatgaaggtggaattaaagaaacttattgatacagctgcaggaagaattccggcagatctggtgattaaaaattgtaagattgtaaacgtattttcaggaaagatccaggaaggagacattgcattttcaggtaatcagattgcaggtatcggtgagtatgaaggcgtgaaagtgattgatgcagaaggaagatatgcagcgccaggatttatcgacagccacatccatattgaatcttcttatgtaagtcctgaagagattggacgcctgttagttccacatggaggaacaacaattatggcagacccacatgagatcgtaaatgtatgtggaatcgctggtctggactatatgatgaaagcagctgagaacacagtgcttgatgtgaaatatgagctgccatcctgtgtaccggctacaccattcgagcattcaggtgcggtgatcgatgcagaagcaatgaaagagccgatcacaagagaaggaattgccggacttggtgaattcatgaatttcccgggcgtgatcaatgcggcagacagtgatctggataagatcattgtagcaaaacaggaaggcaaatttattgatggacatggaccaggaatcacagggaaagaattgaatgcatatgcggcagcaagaatcgcagctgatcatgaatgttctaccgtagaagagatgagtgatcgattggagagaggaatgtacattttgcttcgtcagggatcagcatgccataaccttcgaacattgcttaaaggtgtgacagcagagaacagcagaagatgcctgctctgttctgatgaccgtcagccgaagacaatccttcacgaaggacatcttgataatcatctgcgtatctgtgtagaggaaggtcttgatcctgtgatagcaattcgtatggcaacacttaacgcagcagaatgctttgacctgaaagacagaggagcaattgcaccgggataccgtggggatgttgttcttctggatgatctgaaagatttccatgtaaaccgtgtatttgtagaaggtgctctggtggcagaagaaggaaaatatctgccggagatcaaaaaatgtgatatttcttccgttaagggaagtgtgatcgtaaaagatttctccaaagagaaatttaaaatgaacctgaaatcaaacaaagtaaatgtaatcaagattcttccgggtggagttgtaacagcgaaagatacagcagagattgagttggatgcaaatggagagttcgtaagaaatccagaagttgatcttgtaaaagtagctgttgttgagcgtcatcagggaacagggaatgtagcttgtggattcctgaaaggatacggaatcaaagaaggtgctgtagcactttcagtggctcacgattctcataacatcattgttgttggagttaatgatgaagagatggaatttgccgtgaacagtctgatcgagcaggaaggtggtattgttcttgtgaaggaaggaaaagtgatcgagagcatgccaatgccgattgccggactaatgagtgatcagagtggtgagtgggtagatcagaaactgacagatattcacgagaaagcatatgaagaacttggaatctgtggagatgtggagccggtaatgacactgtgctttatgtcacttgcagtaattccggagattaagctgacagatatgggattgtttgatgtgacaacattttcattcattcctgtagaagttgaataatgaagttaaaaatcaaagaaaacaccattgacgtactgcatgtattttgctatactttaatagttaaataaatacggcgcagtagccaagcggtaaggcgtgggtctgcaacaccctgattcaccggttcaaatccggtctgcgcctctgaagaacctgaaactgatttgtttcaggttctttttttgagcacctacgccaacaatctcagagatagaaaaaactcatgtgagttcgttaaaagaaattcacatgagtttttctttaaaacagtccttatttattttcccagttctttttataaatcagatacagcggaagtccgacaaagatcataccaccgagcatatttccaagtgtaaccggaataaagtttgcaaggctgtgaagtggtgtcagtgttgcaatctgttcagctgtaattccgtaagcttcttctgctttcgcaacataagccggattaagggaagcaaggataccagccgggatatagaacatattggcaacgcagtgttcgaatccgccgactacgaaggcacagattgggaagaaaattgcccataccttaccggcaatatctcttgcggaagtagccatcagtactgcaagacataccaggatattacataagattccggaagtgattccctgcagtggtgaaattgcgatctttccaacagcaactttgattgtataagcaccgagaagtccgcctgagtagttcaggtttccactgtatacaatgagtagatccacgcaaagagcaccgatcaggttactgaaaaatacgatgaaaagatctcggaataatccgccccatgtgacacgtttgtcaaacacgtccatgatgattagacagtttccggtaaaaagttcgccgccaagaaatacgatgagcatcagtccgacagggaagatacatccggcaagagctcttgctacgccaacattttctactgcgtgtgctgccgtgctgcttgtagcaccgccgaaagcgataaacgcgccggccatgatgccgagcagaatcatttttccaagtggaagatgggttttgttctcgcaggccttgatactcagatcaatgacttctgcgggagtgttaaaatgattgtccatgatataactccttattcttttgtaattcggcagctctcctgctgtgaatggtaacacagtaagagaactgccgttgttatattgctattcgtcaagaatttaacgagaatattttatactagaaaatattggatttcaagagaggaaaggtatgtttatatatagatacaaaattcgagatttttattgctttaggacagttatttgtacggtttataagcatccgtaagcaatagtaattatgcaaaatatgtttataaagttattcacctggaaaattttagaaaaatattgttttgtgtagaaaaaagatatcctcattttatcaacaaaaaagatgagttacgaacaaaaaacacattgaaatttcaagtgcatcaaattattctatatctacttctggccgggagtaaaaaacagaaggagaaacactatcggatatctttttccaggggagcgtagtgcatgttattcggctgatatgttattaagacagtataaaagagtaagaagagaattaggaaaaaagtttcattatcgagacataaaaaaagtaatagtgttttcaagagtttttcaaaggacatttatgaagaaatctataacatctgccggaacagcgaaaggatgatggggatgttttcaaaagaactggaaatattggatcgtaatacagtaaaactaatgattgacgagttggatgaggctcttggagaggaaagggaaaaagtaaaagcaataaagcaggaaagggaaacactgaaagcggagaaagaatcactggaggcagaaaaggaactgatccggttgagggcagaactggaaaaactgagaaaatagatgaaatacatagtgatatcagttgtttcttatttactctgcgctcctggagtgttataataactgttaagactgccgggaggcatctgtttgaagattctgataatagaaaaagatagaagaattatttgaaggagtaaatggtatggaactgacaacaattcgtgagttatttaagaacagagagggatatctggacaaagaggtaacagttggaggctggattcgaagcattcgagattctaagacattcggatttatcgtattgaatgatggatcttattttgatacattacagattgtatatcatgataagatggagaacttcgctgaggtttccaagctgaatgtaggagcagcaatcattgttaagggtacactggtagcgacaccacaggctaagcagccatttgaaatccaggcagaagaggttgtgatcgaaggagcatctgcgccagattatccactgcagaagaagcgtcacagttttgagtatcttagaacaatttctcatctccgtccgagaacaaacacattccaggctgtattcagagttcgttctctggcagcatatgcgattcaccagttcttccaggacagaggatttgtatatgtacacactccgctgatcacaggaagtgactgtgagggtgcaggagagatgttccgtgttacaacactggatatggacaatgttccgaagaatgaggatggaactgtagattatacacaggatttctttgggaaagagacaagccttacagtaagcggtcagcttaatggtgagacttatgcacaggcattccgcaatatttatacatttggaccgacattccgcgcagagaattctaacacaacaagacatgcggcagagttttggatgatcgagccggagatcgcatttgcagatcttgaagatgatatggaactggctgaggctatgttgaagtatgtgatcaactacgtacttgagaatgcaccggaagagatgaacttcttcaactctttcgttgataagggacttcttgacagacttcataatgtagtgaactctgactttgcacgtgtaacatacacagaggcagtagagatccttgagaagaacaatgataagtttgattataaagtatcctggggatgcgaccttcagacagagcatgagcgctatctgacagagcaggtatacaaacgtcctgtattcgttacagattatccgaaggaaatcaaagctttctatatgaagatgaacgaagatggtaagacagtagcagctgtagactgtcttgtaccgggaatcggagaaatcatcggaggaagccagagagaggatgattatgacaagcttcttggaagaatgaaagaacttggacttaaggaagaagattatggattctaccttgatctgagaaaatatggttctacaagacatgcaggattcggacttggattcgagagatgcgtaatgtatctgacaggaatgtccaatatccgtgacgtcattccgttcccaagaacagtaaacaactgcgaactgtaataatataaagaagttttagagtgttattcacacatgaacagtaaagtgtgtggataacactctttttttctatatcgaatgtggaaaaccagtccggtttatcgtttgaagtgaaagactgcaaagaataagaaagttatagataactaacctggttttaacattatttaaaagggattttaataaaattttcgctatttaacatagatttaacataacttcacagagttttttataaagccatgataatctcggatatgtaaagaagaaaaaagcactgcgtttgaaaaacagatgcaagacagtgatttgtaattgaaaacagacatgagagaggatctggaggaagaaaaatgaaggaaaacatacagattgttttcgggctgcttggtggcctggcggtttttatctatggaatgaatatgatgagtgaatgtcttcagaaagcggcaggagaaaaaatgaagaaaatcctgtcacttttaacgagaaatcctgtaatgggagcacttgcgggaatgcttgttacagccgtactgcaaagttcaagtgcaacgacggttatggcgattggttttgtaagtgcaggactgatgacactgccacaggcaatttctattatttttggtgccaatatcggtacaacaatgacagcacagctgattgcatttaagttaagtgactacatttatgcaatcatttttattggatttatcgtatattttatctctaaatcagaacgtgtaaaaaatattggtatgacgatttttgcgttcggtttactgttccttggaattgagacgatgggaacagttatgaaaccattagcatcaagccctattttcacagaactgatcggcaaagtggcagacattccgattcttggagttgctgttggtgcattaatgactcttgtagtacagagttccagtgctacaatcgcagtgctccagaattttgcggctcagccaggagctgatggagtgacaagtatcatcggtctggcaggtgcaattccgattcttttcggtgacaatatcggaacaacgatcacagcacttctggcaagtattggtcagccgaaggatgcgaagagaacagcacttgcacactgtatctttaatatttcaggatgcttcctgtttatctggttcgtaaaaccactggcagcatttatccagtatatttcccctaagggaccggagattgaagtgatctccagacagattgccaatacacatacatttttcaaccttgtgatgacgctgatctgggtaccgcttgttggagttatggtgaaaatcgtaatgcgtctgatcccggacggagaagtgaaagaagtcaatgcagtgcagccaaaatttcttgataacaaactgatcagtcagcctacagttgcattacagcttgcagtaagagaattgatgaattgcggagagcaggtaggcgtgatactgaaaaaggcagcagaaaagattgatagtggagatggtgcttctgttgaagaatttgtaaaaagcagagaagtgacagctgaacttacaggaaaaatcacagattatcttgcagaaatggcagcggctggagttatgacagagcagcaggcagcaagagccgcagagcttcagtatgtattgatcgatattgacagaatcagtgaacttacgaaaaatgtcgctgtttccatgcagacagaaaagcttgtgaaaaaggacaagaagagtgcaaaagaagaaagagtacagttctcgcaagaagcatcaaaggatatacaaaagagcatggaacttgtcagtgaaatgtacaatatggtcatgaaaatggttaataatgaagaggcaaatgaggctgaaaatcttgtcaagatgaaagaaaagatccgcaagatggacggagatatcagaaaaggacatattaaacgtgtacacaaaggaaaatgtaaggcaggacttacggctgcattcaatgagattctacataatgtggaaagaatcggaaacagctgtgtgaatctggcagatgcggcagaggacggagtgagattcagcacatttttaaaagagacggagtaacgaattttattatgagcaggcaaactttcaatagaagagagtttgcctgttttctatctacgcgaacaacgagccaaagtccgtgcttgcacgagaccttggcgactgtcgcgataacttgagaaactcgcaaagcgtgtttctcatagtttattaaataagagttggtgcctattcatggaaatccttttgattttatgctgataaaagaagaaaaactgtgctaaaatagttgagacaacaagaaagaacagttataatattaatctgttaatagagagaaaaaagaaacttttactaatataggaaggaagtagtaaatgaagatagaattaccaaagaaggtattgtttatcattaataatctgcaacttgcaggatatgatgcatttgcagtaggtggctgcgtgagagattctattttggcgagaaaaccgcaggactgggatatcacaacgtcggcaaaaccagaagcaatcaaggaaatatttcgccggacggttgatacaggaatagaacacggaacagttacagtaatgattggcaaagacagttatgaggtgacgacttatagaattgacggtgcatatgaggatagccgtcatccgaaggaagttcgctttaccaattgtctggaagaagatcttcgcagaagagattttacgatcaatgcgatggcatataatgatgatgtccggctggtagatgtgtttggtggaatgcaggatttgaatcatcatctgatccgttgcgttggagatccgagggaaagattttcagaagatgcacttcgtatccttcgtgcggtacgcttctcagcacagctggatttcccgattgaacctgatactgccaaagcagtgaaggagcttgcaccaaaccttaagaatattagtgcagaacgtattcagacagagcttgtgaaacttctgacgtctccacatccggagcgcattcaggatgcctgtgaacttggaattacaaaggtggtccttccagaatgggacgccatggtaggagtaaaacagaatacaatacatcataagtacgatgtggcagagcatacacttcatacattgaagcatgtgaagagagataaataccttcgtcttacaatgttgttccatgatatgggaaaaccggcaatgaagacaacagatgagaaaggaaacgatcatttcaaaggacatgctctggaaagcgagaaaattgcccgtacagttttgaagcggttaaaatttgacaatgagacgattcgcattgtaacgaagctggtctgctatcatgattaccggatggaagcaacaccggcgaatgtacgtcgtgcaatgaatcggatcggtgttgaattattcccatactatctcgcagtgcgtcttgcagatgcaaaatcacagagcacttacatgagaagggaaaagattgaaaatatcgtagagataagaaatctttacaaacagatcctgatggagaatcagtgcgtgactcttcgacagcttgcggtgagcggaagagaattgatggaactggggatgaagccgggacgcgaactcggtgcaatgctcagtgaactgctggaatatgtgctggatgatccggaacggaacacgaaagagaatctctgcaagtacgtgaaagaaaaaatggaaaaagaaaagtagaaaataccggaagaaaaagagaatactcaggttgtccctttcatagattagaaagaaatcgttgtcggttgctgttaaaaccgacagtaaaaagtctggtaactggaaaagaataataatccaggtcaatgggacagggggcagccatgagagaatatgagatggaagtactggaaaagtacgaacttgaagtgaatagcacccggcggatcagaggtgcattttattgtgatacaaaagaagggacgatgcttctgaaagagacaaagatctcggagaggcgcgtccctttattatatcttattttaaaccgattagaaaagcagggatatctggtggatacacctgtgttcagtaaagaagggaatctggtgcagaattccagagatggaacaagatatttgatgaaaaaatggtatccgggggaagagtgcaatctgaagagagaggaagatattttccgggcagcaagaaaactgggagagcttcatctggaatttcagtggtatgagccggacttgcaggagaaagaaatatttcagaaattccagaaagaagaggtgcaggaaatctcacagaatacacagcagtcagtttgtgaagaaaagaaaatggactggacaaagttgtcaccattgttaagtaaaaatccattggaagaaatgaaacgtcgtaacagggaaatgaaaaaagtgcggtcatttatcagaaaacgagttgcaaaaaatgaattcgaatcctattatctgaagcattatgaagaaattgcatggcaggcagaaaaggtgacagagcagatagagcggtctggttgccagaatctatatgaaagaagtatacgggaaaggaaaatgcttcatggagattataattatcataatgtcatgatccttccggaaaatgaggtgataacaaactttgagcggatgcgaatcggaatacaagtagacgatttatattaccttttgagaaaagtaatggaaaaataccattggaaacaaaaaacaggacaaaatatattagaagcatatgaaagcgtacggcaattaaaaccagatgaaagagagtatctttgccttcgactggcctatccggaaaagttctggaagacagcaagtgcttattccagatcaaataaagcatggcttccggaaaagagtgtagagaagctgcagacagcagtagaacagacgaaggagaaagaagtatttttgagagaggtcttcgaataaaaagctccgcaaaccgcggaaaatgtggatttatcttgacaaacaacagggaaaccgttataacagtacataagggtttgaggcaagttatcgtgcagacttgtaacctgaataaataaaattaggaatagaattgtatttgagtacaataaaggaggacataatccatgaacaaaacagaatttattgcagcagtagctgaaaaggcagagatttccaagaaagattccgagaaagcattaaaggcatttgttgatgttgtaacagagcagctgaaagcaggagataaagtacagcttgttggatttggtacatttgaagtaagcgagagagcagcaagagaaggaagaaacccacagacaggaaaaactatgacaatcgcagcttgcaaggctcctaaattcaaagctggaaaagcattaaaggacgcaatcaactagttcaggggattttgtagaagaatatatgagactggataagtttttaaaagtctcccgtctgatcaagcgaagaactgtagcaaacgaggcctgtgatgcaggacgtgtgctggtgaatggaaagacggcgaaagcatctgtgaaggtaaagccgggtgatgtgatcgagattcagtttggaacgagaatcgttaaggttgaggttcttgaactgcaggagacaacaaaaaaagaagaagcaaaggacttatttaaatacctgtaaagtctgtcagacaacaggaatctataagtcgatcaatggttattgttttcagtaatcttagaaaggcagggaatattttacaaagtgagatattccctgcctttctgtatgctatacaataaagcattttcgaacgcacacatataaaacccttatctgtaaggaataagtgtaaaagctctgacatatatatagaaaagtacagggaactgttatctggttccagtaatatactgtggggtatgccagagaagagggaggtgcagcggatggaggaacagcaaaagactgtaaaagctcataagctggtggttaataaccggaagacaagtatggtgacaggtgttctggatgtattgtcttttgatctgaatgagattcttctggaaacagagcagggaatgctgttggtaaaaggaacagacttgcatgtgaaccgtctcagtgtggaaaagggagaagtagatttgtcgggaacaatagacagtgtttcatattctaatatttcacaggcaaagaaacaggaagaaagcttttggacaaagatgttcaagtgaggaagaaagaagatgctaaatataaaaaaagaactgcttgtcttcttctgtgcctgtcttacgggtgtgaatgtccgggctgggtacgagatcctgatttttttaaggaaaatgataatacataataatctggtgaaaggaatcgaggatctgttctactggatatttatgagtgcatatattttctcacagatatatgcaactacgtatggtagtattagatggtattttctactaggtcttgtatttggcgttgccgttattcagaaactgatttcgtctggagaaaaaatacacaaaaaaacaaggaaaaaccttgaaattattagaaaaaacagatagaatgttgataattgggaagtttatagggggactccgtcagtgaaggcaggattgatttcccggtaacgttaagagtgtattattttagggtgaattttagatggcaaagaaaaaaagagtgactggacggcgcagttatacaaagcagagacgtccaagtccgtacaaaagaagcgttcttatgattttgtcagtattgtgtcttctttccggtgtgctgggagtgaatgcagtaaagcttcatgcaaagaatacagcgtataaacagcaggaagcagaactgaagacacagatcaaaagtgagcaggcaagagcagaagagatcaaagaatacgagcagtatgtacagacagatgattacatgaaagagatcgcagaagataagctgaatcttgttgatccgaatgaaatcgtatttaaaccaatcaagtgaatagtaaccgaatctgcaaagtcagtgaaagacggatacagaattttacgaaagataactccgggagagaaagttctcctggagtttttctttttacgcgaacaacgagccaaaatccgtgcttgcacgagaccttggcgactgccgcgataacttgagaaactcgcggagtgtgtttctcacagtttgagtaacgaggggggatggaaatggaaaatggacaggtattacatagtagtctatatgtggaacagattgataagtttgcagtttcattaaaacagttagcgaaaacatttttgaaattagaagaaaaaaaacagacattttcagaagaagagattgatgaaatgtttgcctgcgtaagagaagaagtgtgtgaaaaatgtgagaaaaacagttggtgctggggcgaaaactatattcagatgtatcagatgggatatgagattcttgcagcagtggatcagtatggaaatgaactggatgcagagacaaaaagaaaactgatgcagcgatgcattatagctccgcggttttatcgggggatgcttgacagttttcacgaagcaagacaaaatatgatctggatcaatcgtatcgcaagaagccgggaagggtgtgcagcccagcttgatctatttgcagatatgctgcaaaatgtggcgaaaaacctggaagacagcatatttacagatgaaaggttggggaaacggatcttgtctcaattaaaaagaaaaggaatacgtgtactttccatgcattttcttgtgaatggagagggaaaatatgaattgcatctgacgatgcgcacctggaaagcggaaaagattccggtaaaaagtctggcagggattctgagtaatctgacaggaagaagattgattccgggaaaagaaggggcgcagttgatcggagcggattatacaacagtggtcttccgagaaggaccatcctattacacaatgtccggaatagcaagaatcggaaaaggctgcagtaatatttcaggggacagtttcacgatgatggatcttccgggtggtaaaaggggagttgcattgtcagatggcatgggatgtgggcaggctgcctgtcgggaaagcacacttgtgatagaacttctcgaagaacttctggaagcgggatttccggaaaagactgcgatccagatgatcaatacaacactggtctgcggaagagaagaaatccattactctacgatcgaccttacagtgtttgatctgtatacaggagaatgtgaattgatcaaggcaggcgcatcctcaacttttatccgaagaaaggatcagattgagcatctgacatcgacaagccttccgatcggagtgatgaattcacttgaaatagattcagtgaaacggcagttgacggatggaacgtatgtaatcatgctgacagatggagtgctggatgcacttccggtaggagagcaggacttccttcttgaaacaatcataaaaggaacggaaatacgaaacccaaaggaactggccagacacattttacagcaggtacttaactggacaggaaaagaaccggaggatgatatgtcagttttggttgcagctttgtggaaatgcagaaagtagtcattgacatagaagtaatcgttaacgtatagttgaggtatgatggataaaagattagaaaagattgaaaactatatcagacaatatcatatgatagaaaaaggggacaggattgtcataggtgtatcgggtggcgcagactctgtatgtctgctgatggcactttgttcattgcaggaaaagctgggatttcaggtgcttatctgccatgtgaatcatgaactgcgcggggaggaggctgcacaggatgaggcatatgtggaaatgctttgtcataaaatgcaggttcctttttttgcatttcatgaaaatgtggaattaattgcaaaaaagcggaaagaatcattggaggaagcaggcagatatgtgcgaagacaggcatttgaacaactctgtaaagaacagggcgggacaaagattgcaacagcgcaccatagtaatgacaatgcagaaacaatgcttcttaacatggcaagaggaaccgggcttcgcggattgtgtgggataagaccagtgtatggaaaatggatccgcccacttctggaattgtccagggaagagattgaacagtggttgaaagattgtgatatcagatattgtgttgacgaaacgaatcaggaagatgaatacacaaggaaccggattcgtcatcatgtaattccgacattagaagaacaggttaatacaaggacggtagaacattttgtgaagctcagtgaacaggcagaagaaatctatgaatatctggaaaaacagacagatcaggcatggaatatctgtgtaaaacagacagacggacttcaaagcaggaaagaaatatttctcaaggcagaggaaatgaaacaccttgatcctgtgataaagaaattactgatccaaagatcagtaagtgaagtggcaggggcacagaaagatattgaaagcaggcatatcctggcggtactgcaactgtttgaacggcagacaggacggcagatcgatcttccgtatagtgttacagccaaaagaatgtatgagggagttctgcttacaaaaggtgataaaaaagttacatctgtacatcagaaagagaaaagaaaagaagagagtaattttgttctacagcttcagattccgggagaaacacagatcccgggaacaaatttgaaaatctgctgtacaatcagcggtgaaaatgagaagaattcagcaaaagagataccacaaaaaagctacacgaaatgctttgattatgatataataaaaagcagtctctgtgtgagatacagacggcccggagattattttacaattgatggggaaggaaagaaaaagaagctgaagagttactttattgatgagaagattccgcaagaagaacgggacagacagcttctgatcgcagaggaaagccacatcgtatggattccgggcagaaggatgagttcgtactaccaggtgggagaccagacgaaaaagattcttaagataaagattatggaggaatagaacaatggctgagaagattaaagtgttaatttcagaggaagaagtagatgcaagaatccgtgaactcggagaaaagatcagtaaagagtatgaaggaaagcagatccatctgatctgtgttctgaaaggtggagtattctttatgtgcgaacttgcaaagagaatcacagttccggtatctatggactttatgtgtgttggaagctatggagacggaacaaaatccagtggtgttgtaagacttgcgaaagatctggatgagtctattgagaataaggaagtattgattgtggaggatatcattgattccggtaatacactgtattatctgatggacgtacttcgtcagagaaagccggcaagtctccgtctttgcacattgcttgataaaccagaccgccgtgtgaaagatgtgcacgtagactggacaggatttgagattccggatgagttcgtagttggatacggactggattatgcacagaagtatagaaatcttccatacatcggagtagtagaagtcgcagaatagaaaggaagcaataataaattgaataatgacagaaaaagcagaggtctgagtggggcaacgatcatcagttttgttgtgatccttgttgtggttctgtggatggcgaaccagcttcagatgcatcagcaggagatgacatatacctcctttgtctctgcagtacaggaaaaaaatgtttctgatgtctacatcaatcagaacagtgcagttccgacaggaaccgtctctgttacattgaaagatgatggtaatacaaggaaagtgaatgtgtcagatgttgagcaggtagagaagcttctgacagagaatcaggtggagtacaggctttcggatgtaccgaaggattctatgttgacaacagttgtagttccgatgctgatcacacttggaggagtatttctgatctttttcctgatgagccgtcagaacggcgggggaaattctaaggcgatgaactttggaaagagccgcgcaaagatgagtacgaagaatgagatcaaggttacatttcgtgatgttgcaggattgagagaagagaaggaagaactggaggagatcgtagattttctgaaagatccgaagaaatacatccaggttggagcacgtatcccgaaaggtgttcttttagaaggacctccgggaaccggtaagacacttcttgcaaaggctgtagccggtgaggcaggagtaccatttttcagcatttcgggctcagatttcgttgagatgtttgttggtgtgggtgcttcccgtgtccgtgatctgttccaggatgcgaagaagaacgcaccatgtatcatatttattgatgagatcgatgcagtcgcaagacgccgcggaagcggtcttggcggtggtcatgatgagcgtgagcagactctgaaccagctccttgtagagatggatggatttggtgtaaatgaaggcattatcgtaatggcagcgacaaaccgtaaggatattctggatcctgcaatcttaagaccgggaagatttgaccgtgatgtccttgtcggacgtccggatgtaggcggcagagaagagatcctgaaagttcatgcgagaaataagccgcttggagatgatgtggatctgaagcagattgcccagacaacggcaggattttcaggagcagatcttgagaatcttctcaatgaggctgcaattctggcagcgaaggagaatcgggtgtacattcagcagtctgatatccgtcatgcatttgtgaaggtcggaatcggtccggagaagaagagccgtatcgtttctgagaaagaacgcaggattacagcttatcatgaagctggacacgcgatcttgttccatctgcttccggatgtaggaccggtttacagcgtatctatcattccgacaggcggagccggcggatatacgatgccgcttccggagaaggatgatatgttcaatacaaaggggcatatgcttcaggaaattacagtttcccttggcggacgtgttgcagaagaagagatttttgatgatatcacaacgggagcttcccaggatatcaagcaggcaacagcaattgcaaaatcaatgatcacgaagttcggtatgtctgaaagactggggctgatcaattatgataatgacagcgatgaagtattcattggacgtgatttcggtcatacatcaagagggtatggcgaaaaagtggccggaacgattgatgaagaagtgaaacgtattattgatgagtgttatttgaaagcgcgtacacttattcaggagtatcatccggtactcgagaagtgtgcacaactgcttcttgagaaggaaaagataacaagaagtgaattcgaagcactgtttgcagacagtgaggttgacggataatagtcagtatattgattatatgtatttagaataagataccctctgccggcgggcgatcccgtgttggccgggggtattttggttctattttagaatagttttaagaattgagttaaaggaggctaaacaggtgaatagagaagcactgttttgtgacggtacaggtgattatgtctgtccggcagagcctgagataaatgaaaaagtagtgttgcgatttcgtacggcacacaatgatgttgatgaagtgaaacttcacatcggagaacaggagtatcctatgtggaagacacgtacgaacggtgaatttgacttttacgagattgagtatcagcttggtgaggatatcttaagatattgttttgaaatcaagcagggagcagaaatctgtttttatagtaggtatggaataacagggaaaaaagaaaactattatgattttattatttcgccgggatttaagacacccgagtgggcgaaaggtgctgtgatgtaccagatctttgttgatcgtttttataatggagatccgacaaatgatgtggaggataacgaatatatttatattggggcaccgagccgcaaggtgaaggaatggaatcaggcaccggaagcaatggatatccgtaatttttacggcggggatttacagggtgttttagataagctggattatctgcaggatcttggagttgaagttatttacttcaatccgttgtttgtttctccatcgaatcataagtatgatattcaggattatgattacatagatccgcattatggaaagattgttgtggatgacggagaagtacttccggcaggtgcaaaggataatatccatgcgacaaagtatcagcaacgcacaggagatatccgcaatcttgaggcaagtaatcagttgtttatcaaactggtagaagagatgcataagcgtggaatgcgtgtaattctggatggtgtattcaatcattgtggctcttttaacaaatggatggacagagaacgtatctatgagccgcagccggactatccgaagggagcatatgtaagtaaagaaagtccatataacagctttttcctgttccatgatgcgagaaatgaactctggccttataacggaacatatgatggctggtggggacatgatacattgccaaagctcgattatgaggattcaccacagcttgagcagtacattatggatatcggaagaaaatgggtatcaccgccgtataacgtagacggatggcgtcttgatgttgcagcggaccttggattcagtaatgaatacaaccatatcttctggaagagattccgaaaggaagttaaggatgcgaatccggatgcaattatattagcagaacattatggagatccgcaggattggcttcagggagatgagtgggacagcgttatgaattatgacgcatttatggaaccgctgacctggtttttgactggtatggagaagcatagtgatgaatatcgtccggatctgtgtggaaatgctgacaactttgtcggagcgatgcgtcattttatggcaagtatgctgacaccatctcttcaggtggcaatgaatgaactttcaaaccatgaccattctcgtttcctgacacgtacgaaccacaaggcaggacgtgtggcacagcttggaacagaagcagctgaaaaggatgtgaataaggcaatcttacgagaagcggttattatgcagatgacctggatcggtgcgccgacgatttattatggtgatgaggcaggactttgtggattcaccgatccggataaccggagaactttcccatgggggaacgaagacaaagaacttcaggcattccacaaagaagtgatccgtatccacaaggaagagaaaccgctgaaaaaaggttctatcaagttactggcgtcagatgaaaatctgttggcctatggaagatttgaagcagatgaacagattgtcgttgttgtgaataacagtgatgaacttcgtacagtgaccgtaccggtatggtatgcgggtgtagagatggaaggacggatgaaacgactgatctactcttatgaaaacggttatacgacagaatatgacgagtatatcgtacaagatggagagattgtcctgaatatgggatctcattcagcaatcgtattaaagccggcagaagcattgagattgatgtcgtaagaagtggaacggtattttgcagataaagaaagagcattatacaagaataataaaaatacgggatgagcagttttaatatctgttcatcccgtatttgttactattattattttgtaagaacctctgccccattctcagtgatgagaaccatgtactcaatctgggcagaaagaccgtcatccattgtataaatagtccagtcattgtcctcatctacgaagaagtcagggctgccttcgttgatcataggctcaatcgtgaacatcatacctggaacgagaagcatctcacttccctttggtgtcacatagctgacaaaaggatcttcatggaattccagaccgataccgtgtccgccgatatcctctacgacagagtatccgtttgcacgggcatgtgtattgatcgcatctgcgatatcacctaaatgtccccaaggcttcgcagcctcaagtccaagcttcacacactcttctgtgacgcggacgatgcgctctgcacgttcagatacttttcccattttgaacatacgggatgcatcagaaaaatatccgtcaagaatagtggatacatcaacattgatgatatctccctcttccagaatgatattctcatccggaatgccgtgacaaatctcattattaatagaagtacacacgctcttagggaatccctgataattgagcggagccgggataccaccgtgttcttttgtgaaacgatatacgatgtcatcaatctcctgtgtgctcattccaatgtggatctgtcttgctacttcatccaggatcgctgtattaagctcagcactttttctgatcttttcaatctggaatggagtttttaaaatcttacgtgtcggaacaatctcaccacgttcagcatgcatcattatcttttcttcaatcggcatatggcatttcttatacttcttgccgctgccgcaccagcacaattcatttctttccatgatattacctcttctaaaaatcacttattttctcggtttctacttattttatcacaaaattcgacaaaaagatacatgttatgcttgccgagaacgtaaaaatatagtacgattaagattcagataggagtgataatgcatatgtggtattgggcgattatggtactgctgattttaggaagtatcgcacttctttgcagtacatttataagtgtaaaaaagaataaggcacaggacgcagagcggagaaagcagtccaggaatggaaagcgtaacaaggcagatcagggatatgatccagaagaggatcagccgcagggaaagaagagacgcagttcagggcagaacggttctatggattcagcgaagcgttcttctaaaaaaagaagacagtggaagattatcctggaagatctggatacatggcagaaatatagcttcatattctatgatgaagtgggaatcggaagagcaaagaggaatgacaattatgagaagtatctgccactgcatgaggatggaagagtatccaagcagcattgtgtgatcatacagagaggtgactgtttgtatctgatggatgatggttccaagaacggaacatacctgaacggaatcctggtagatcgtccaacagagattcagagagaagatgtgatcggcgttggggagaccagactggagattctcagaatcttaagagaaagtgaataatgaaattacaggcaaggaagtccggcggaaaagccaggacttctttttctttttgatcgtaaaatgaagaatctgtgtgaaagtaacagttgagtaaggaaaatcatatagtagttatatagttactgttcactcccgtgtcaatcacttcgctgattgacacggaggatgcgtgttttgacttgaatgcatctcgccccatcgccaaaggcgatttaaaatggcgagatgcgttgctggtcgcacatcgtgtgaacagtaacgttatatagccgccggatctataaactgcaatcaacaggaatgcggacagcagagacggcacaacttattgtcagtgggagtgagcaacatgtaccagaaattgccttattatatggcctatccgatacagacagaatatgatgagagagcagaaaggacagacctggagtatatgaaaagcctgtatccggatcttccaaagagaatactaccttatgtcgaagaggaatgtgacaggatggaatacacggggagtgtgatgtttgatgtttacccggataaattgcagttacgcatcatgtgcagcagaatttgcgaaaatgtaaaaaaacaggagaaaatgtttgccggggaagagcggatgttaagagatctggcggaagttttgttatatcaggaaatctaccgacgcaggggcgaacagagaaaaaggaaacaaaaaatttacagttattgttcattgccaggaaaatctatgatataatcattcagattacaacaaaagaaacggattcagaagaagggaacagatacagatgaaaagtaatcttatatttatcggtatgccggctgtcggaaaaagtacagttggtattgtagtagcaaaaagacttggaaaaggtttcatagattcagatcttctgattcaggaacaagaaggaaagcttctgcgtgaaatcatagcagaagtcggtgatgatgggtttttaaaaattgaaaatcaggtaaatcgtgatataaaagcagaaaatgcggttatttctccgggcggaagtgttgtctattgcgaggaagcaatgaaacattttaaagaaatcggaattgttgtatatcttcatgcttcttatcagacaataaagaggagaatcagaaatcctcaaaaaagaggagttgttttgaaggacggtcagacattaaaagacctgtatgacgagcgaaaagtcctttttgagaagtatgcagatgtgacaatcagtgaagagggctgtcagattgaagaaacaatagaaaatgtacttgatgctattgagaattactcttaaaataaagcgtgaatattaccgtcatagaaaaaagggattccacaatgaaagattttgtgttatagttatgtatggattatattgtaattaagatagatagttcttttcgtatagataaagacacaagaataaatcgttactgaacacaggatctgtgggaagtaatacagaatcggacaattgaggtgcaaaatggagcaatatattattaagggtggtaatccgctggttggggaagttgaaatcggcggagctaagaatgcggcacttggaattcttgcagctgcaatcatggcagatgaaccggttttgattgagaatcttccggatgtgaatgacattaatgtcatgctggaggcaatcgagggaatcggtgcaatggtacagagaattgacagacatacagtaaagatcaatggaaatacaattggagatttcagtattgattatgactatattaagaagatcagagcgtcttattatttgttaggtgcacttcttggaaaatacaagagagcagaagtagcacttccgggaggatgcaatatcggaagcagaccgatcgatcagcatctgaaaggattccgtgcacttggagcagatgtagacattgagtatggtaagattgttgcagaggcggaagaactgaagggaacacatctttatttcgatgttgtgactgtaggtgcaacgatcaacgtaatgatggcagcagctatggctgacggtcttacgatcatggagaacgtagcgaaagagccacatgttgtagatgtagcgaacttcctgaacagtatgggagcaaatatccgtggtgcaggaacagacgtgatcaagatccgtggagtgaagtccctgcacaaggcagagtactccatcattccggatcagatcgaagcaggaacatttatgtttgccgctgcagcaacacgcggagatgtgacagtactcaatgtgattccgaagcatttagacgcaacgatctccaagctggtagatatcggatgtgaagtggaagaatttgacgatgcagtccgtgtagtggctaaaggacgtctgacaagtacacaggtgaagacattaccatatccgggatatccgacagatatgcagccacagatcggggttgtgcttgcacttgcgaagggaacaagtacgatcacagaaagtatcttcgagaatcgttttaaatatttagatgagctggcacgtatgggtgcgaatgtcaaagttgaaggcaattcagcaacaatcgagggtgttgagaaatttacagcagcaagagtcagcgcgccggatcttcgcgcaggagctgcgctttgcatcgcaggacttgcaacagaaggaattacgatcgtagatgatattgtttatatccagagaggatacgaacgctttgaagagaaactcagaagtctgggtggaatcatcgagaaagtgtccagtgaaaaagagattcagaaattcaaattaaaagttggctaaaccgaggttactgtttacaacaagctgcggccggcagcgagccgatacagacagaatccgaagaaatatgatgtgggaacgtatgcaggtgtcggaacgaaagttctgatacctgttttcagtttatatgtcaggagttatggcgtaataggcgatcaggcaggtcgaatgaaacagtggcgggatattaacaagaaaacagcaggagcaacgaacgatgaatgaatttgaacaggcagaagaacggagaaaaagacagagagaagaaatcaaacaaaagaggatcagacagctcagacgaagaatgactatttccggctgtattttgttgtgcataatcatagcgctggcagcctttgcagtcaatgtggctaagaaaaagaaactggcagcagaacagaaaaagcagctggagcaggaaattgcacagatgaatgaatcgctgaatgactgctacaatactttcctgacggataatggagtgtcagcggaaaagtctgatgttacagcatttacgaaatggctggaaaagaactattctgaagagatggatgatttatttccagtctatcagaagaataaaaagataacagtgcaggatatttatgattcctttggagcaactttgcatgttctgtcagatacatacgaaggaaaattaaaggatgaagctaccgctgcgaagaatcatatctatgagaagaaggcagcagagaacggaaccgtgcagatcacagcagcaggtgacctctgtctggaggaagatggatatgttctcgattattatgatacggtaaatgacttgtccaaatgcatttccaagacaattctggatcagacaaatgcagcagatattttcttcctgaatcatgaatattgtatcagtgaccgtggaaccccgctggaggataagtattatgtattccgtgcaaaaccagaacgcatgaagttgctggaacagatggggacagatattgtttcaattgcgaataatcacatttacgattatggtgcagatgcgatggatgatacgatcaatctgttagatcaggcgaagatcactcatgttggaggcggaacgaatctggatgaggcaaagcagccgacttattatatcattaacggaatcaagatcggatttgtggcagcttccgagggagaacagtataaatttacaccggaagcaacagattcaacgacaggtattcttacatcttacgacacaacagagtataatcaggtgatcgcggatgcatcaaaggaatgtgattatctgatcgcatatgttcattggggaacagaagatgaggatatgtataattcaacacagacagagcatggaaaagaattcctgaagtcaggagcagatatcgtgatcggaggtcatccgcatgtacttcagggaattgaatatacagaagatggacctattgtatacagtctgggcgatttctggtttaatgatgagacaaaatatacgggacttctgaatcttgagattacatcagaaggattgaagcagatgtcctttacaccgtgtgagcagaaagacagccagacacagtatctgaataatgcagagtcccagagagcactttttgatcacttgcagaagatttcaccgaatattacaatcgatgataccggagtgatcacggagttgaaagatgttgatgcagaatcatagaaatataaaagttttatcaacttcaggaaacggtattgacataatcaacaaggtgttgtatagtctgatacgaaacaaaattaaatagatgatactttctcttattcagagcagtggagatacaaaggatctaagaagctgcggcaacccctcgtaataggaaggtgccaacctgagcgagttatttcgaacaataagaggattgttaagataaactgacagtccgcttgatgcgggctgttttcatttacgcgagcaacgagccaaagtccgtgcttgcacgagaccttggcgactgccgcgataacttgagaaactcgcagagcgtgtttctcatagttttgggcaatgtaagcaaatgaagacagcacaagcgagagaaagtgagatattgctgtggggacagcaatcggaaaggagaacagatatggaaagagaaaagattttatttacatcagaatcagtaactgagggacacccggataagatgtgtgaccagatttcagatgcaatccttgatgaactgatgagacaggacccgatgagccgtgtggcatgtgagacatgctgtacaacaggtcttgtaatggttatgggagagattacaacacaggcttatgtagatatccagaagatcgttcgtgacactgttcgtgagatcggatacacaagaggaaaatatggatttgatgcggatacatgtggcgtgatcacaacactggatgagcagtcagcagatatcgcactcggagtagataaagcacttgaggcgaaagagaacaagatgtcagatgaagacatcgaggcgatcggagcaggagaccagggtatgatgttcggttatgcttctgatgagacagaagagtatatgccttacccggttgcaatggctcataagcttgcacgtcagctgacaaaggttcgtaaagacggaacacttacttaccttcgtccggatggaaagacacaggttacagtagagtacaacgaagacggttctgtaaagcgtctggatgcagttgttctttctacacagcatgacccggatgtgactcaggagcagattcatgaggatattaagaaatatgtattcgatgagattattccggcagaactcgtagacgaagagacaaagttcttcgtaaacccgacaggacgtttcgtgatcggtggaccacacggagacagcggactgacaggacgtaagatcatcgttgatacttacggcggaatggctcgtcacggtggcggtgctttctcaggaaaggactgtacaaaggtagaccgttctgcagcttatgcagcacgttatgcagcaaagaatgttgtagcagcaggacttgctaagaaatgtgagattcagctttcttatgcaatcggtgttgcacagccgacatctatcgcagttgatacattcggaacaggaaaactttctgatacaaaactggttgagatccttcgtgagaactttgatttccgtccggcaggaatcatcaagatgctggatctgagaagaccaatctacaaacagacagcagcttacggacattttggacgcaacgacctggatcttccatgggagaagctggacaaggttgacgatttaaagaaatatctgtaagatagaaatatctgatacaagcaccggaaggtgcctgacacccgtcataaagtgtcaggcacctttttcaatacggaaaggagatgcttctatgaaattacgtaccaaactgattattgcttttgtagtcgttatgatctttcctgtaacatttgcactgatcgcaatgcatgcatttgttccgggaagaggggcagagatacagcagctgtatctgatcgcagttgtccttacgacagcatttctaatcttgtggatctacagatcggtatcggtcccgctggagaaacttcagagagctgcacgcaatatcaaagagggtaatcttgactttgagatcaaggcagaatcaaatgacgagatcggacaactctgtcaggactttgaagagatgcgtctcagactgaaagcacaggccgaagaaaaggtagcatttgacagagagaataaagagctgatcagtaacatttcacatgacctgaagactccgatcacagcgatcaaaggttatgtggaaggaattatggatggggtagcagatacgccggaaaagatggacagatacatcagaaccatttataataaagctaatgagatgaatcttctgatcaatgaactgacgctttattcaaagatcgatacgaatcgaattccgtataatttcacaacaatctctgcgaagggatattttgcagattgtgcggaggatttaagtgtagaactggaatcaaagggagctgaatttacttacaggaactttatggaagaggacagcaaggtgatcgtagatccggagcagcttcgaagagtcatcaataacatcgtatcaaattctatcaaatatacagataagccaaaggtgaagattacgatggatgtaaaggacgtgggagactttattcaggtagaactgggagataacggaaagggcattgcggcaaaggatctgccgaatatctttgaccgtttctaccggacagatgcttcaaggaattcttccaagggaggaagcggcatcggtctttctatcgtgaagaagattgtggaagagcacggaggaaagatctgggcaaccagcgaagagggcgttggaaccacgatgtattttgtaataagaaaatatcaggaggtacccgtagaagatgagtaaacgtattttaatcgtagaagacgaggaaagcattgcagatcttgagaaagactatctggagctgagtggttttgaagtcgaggttgcgaatgatggtgagataggacttaagaaaggacttgaaggagaatttgatttgatcattctggatctgatgcttccgggagtagatggatttgagatctgtcgtcagatccgcagccagaagaatacaccgatcattatggtttcagcgaagaaagatgatattgataagattcgtgggcttggacttggcgcagatgattatatgacaaaaccgttcagtccaagtgaacttgtagcgcgtgtgaaagcacatcttgcaagatatgagagactgatcggaagtaatgtagagcagaatgaagtgatcgagatccgtggattgaagattgacaagacagcacgtcgtgtctgggtgaatggagaagagaagtctttcacaacgaaagaatttgaccttttaactttccttgcaggacatccgaatcatgtgtacagcaaggaagagcttttccgtgagatctgggatatggagtcgatcggagacattgcaactgttacagtacatattaagaagatccgtgagaagattgagtatgatacttcacatcctcaatatattgagacaatctggggtgtgggatatagatttaaagtataagaagaaagagaggactctgccagtgaatggtggggttcttttttatatattaggaaagtgctttcctaatatataaaaaacgctccgctaaggatgcgcactgcggcgtacaatgtagatgtcgcaagcgaccgccgcaggcgcaagaatgtgcaaggcacattctttgttctagaaataataaagatgtcaactcaaataaagaaaaggttgacaatcgaaaaagacatggctatactattttcatatgttgcaaataagatcaacagaatgataatgctgaagaagcgttggagatatttgaggattgcgggaattacatagcaatggagtaatccggttgcatcagtgaatgacaaaaattacttttgaaactcatatcatagaaacagaagaaagggaaatataccatgtcaaacagatcaattcatacattactgaaaaactgggatgaagaatgtccgcttacaagagaagaagcagttgaagtgctgaatcttccagaggaggagatggacagtctgatggagtgtgcttatgcacttcgtacaaaatacaaagggaagaaagtaagcgttcagcttctgacaaatgttcgtagtggaaactgtacacagaactgcgcttattgtgcacaatctaaggattctcaggcagagattgagaagtacaagagagtatcagatgaaaagctttatggagataatgacctggtagatgagaaacatcttgcaagacattgtatcggattgagtggaatcggattctcagacgaggagattgaagatcttgcagaccgtatccgcgagatgaagaagaaagatacacagatctgctgctccatcggcttcctgacagagaagcaggcaagaatcctgaaagatgctggattggaccgtatcaaccataatctgaacagcagccgttctttctatccggagatttgtacaacacatacttatgatcagcgtgtgaataatatcaagatgcttcagagtcttggattcgagatctgcagtggtggaattgttggaatgggtgagagtaaggaagatatcgttgatatgctgatggatcttcgcgagatcaatccggaatcggttccgatcaatttcttacttccgattccgggaacaagactggcagatcgtgatatctcagagctgacaccggagtattgcttgaaagttctttgtctggcaagactgatgattccgaagtccgatatccgctgtgcagcaggaagagaagtttacttcaagggattggaaccggaacttttcaaagttgttgattctatctttgcatcaggttatctgacagccggaggccagggaatcgatgacacaatgaaaatgataaaagatgcgggattcgatggagagatcgagtctacagatcactaaaaatgattcaaactatataataattttaaataaaccgccaaacgaaggatacgctgttctgaggatgaatcagagtggcgtatctttcgttttatcagcttttacttgcagatgataaaagggagtggtaacatggtgtttaataattgtcatgtgagagcgaggaaagatagacatgtatggattttatatagatgaagacaggagaaaagcacgaagagcaaaatggaatacagtgaggatcatatcaatcggattctttggcgtgattctgcttggcagtctgctcttatggcttccattttcaaatcatcagccgattcgttatatcgatgcactgtttacagctgtaacatgtgtctgcgtgacaggattggtgacagttgtgccggctgcgcaatttacagtggcaggaaaagtgattctgcttattctgatccagatcggcggacttggaatcattgcatgtacaactgcatttttaattctggttggaaaaagaataaatatgaaggaacgagttgtcattcaagaagcctatggtctgtccacacttcaaggaatgatccggtttattgaaagagtattgtggggaacatttcttgtagaaggaattggcgcaatcggatattcatttcagtttattccggagtatggtgttgcgaagggaatcttctattccgtgtttcactcaatctctgcattttgtaatgcgggtgtagatattcttggagattcaagctttacgagatatgtcaatacaccagtgatcacaattacgacaacaatgcttgtcattctcagcggtcttggttatccggtatggatcgatcttgcgaagaatataaagatgacaatacagtccaagggaaaacggccagtcggaagaacgatcacaagactgagcctgcagagtaaaattgttctgacaatgacgttgttccttcttactttgggaactttgggattctatttgttggagcatcataatccggcaacgatgggaacattgaacgctgcagggaaattccaggcggcttttttccagtctgtgacgacgagaacggcaggatttgccagcatatctcagtcaggccttacgaatggttcgaagctgctggcctgcatgctgatgatcgtcggtggttcaccggcaggaactgcaggtggtatcaagacaacaacagttgctgttctcttgcttacagcgatttctgtcttgagaggaaacaaagatacggaatgttatggaagaaaaattacattcgaaattataagagtagggataacaatcacacttgtgacatttgtcttctggttgtttggggtgacggtgatgacagtgatcgagccacagcagaaagtccttgatctgatgtttgaggcgacatctgcgatggcaacagttggtctgacagtggatctgacgccggtgcttagtgatatcagtcatgtcgttctgatgctcatgatgtatattggacgaatcggaccaatgacgatggcacttatattttccggtcatgtggataagaagaatcagttccgtactttgccggaagcgaagattatggttggataaaaatataaaagagaagataaaagaaacgggataaagaaaagataagaagcagtatatgagaaggagaaaacgatgagaaagcagtttgcagttctggggcttggtagctttggccggagtgtggccttgacacttgaaaatatgggatgcgatgtgattgttgtagataaatcacaggagacaattcaggagatctcggacagagtaacttatgctattacggcagatatcacagagaaagaagctctgagtgcactgggaacaaggaatttggacggagcaattattggagttgcggagaatcttgaagcagggatcatggcgactctgctttgtaaagaaataggaattccaaaggttgttgccaaagcaaagaataagttacagggaactatattgaagaaagtaggggcagatactgttgtatatcctgagattgagatgggcagccgggttgccaaaagccttctggcaacagaattcacagactggattgaactgtcaaatgattacagtatggttgagatcgctgttccaaaaccgtggatcaatcacagtatggcagaactgggtatacgtacgaaatatggagttacagttgtaggaatcatgcaggacggaaatgttaatgtagagtttaatccacagatgccgcttccggagaatgcactattgattttggttggagcaaataaagtactcgaaaaaattggaaaattggagaaatagattatgataacaagtacatcgaatgcacagatcaaagaactggcgaagctgcagaagaagagccgcttaagagatgaaaaaggaatctttctcgtggaaggaccaagaatgacagaagagattccggcggaacgaattgagaaagtatatgcttcagaaagctttgcaaagaagaataaagaatttttagagaaattacaggcgccggtcgagcttctgacagatactgtgttcgcttatgtgtcagatacaaagacaccgcagggaattctggcgattgtgaagagactcaattatacgatgaatgacctgatgcaggtgaaaaatcagaaggcaccgcacttggttgtgttggataatctgcaggatccgggaaatctcggaactattttcagaacagctgaggcagcaggtgtaaccggaatcttattgagcaaagattgcgtggacgtctacaatccaaaggtgattcgttccacgatgggggctgtattccgtatgccgttcctctatgtggaagatcttccggagaagatcaaagagctgcagaaggaaaacattaaaacttacgcagcacatttgcgtggagaaaatgcatacgacgaggaagattatacaactggttgtgcatttctgatcggaaatgaggggaacggacttcgtgatgaagttgcagactgcgcggattgtctcatccgtatcccaatggaaggcgaggcagaatccttaaatgcggcagtggcagcggcggttctgatgttcgaagcaggaagacagagaagaaagaaataataaaaatgcataaaagaatgtataagtactgaataaatatgtataaaatggagtaaaataaagttttagttgcatttttatacatggatgtagtatactaaattcatcggttacaatgtaggttcaaagatatgaagaagagaaggacagagagggttctgattcatatagttatagaatagaaaggacgagaacgatggatttaaaaggaagaaattttctgacactgaaggattttacaccagaggagattacatacctgcttgatctggcagcagacctcaaagagaagaagaaaaacggagtaccggtggatcattatcatggcaaaaacattgcactgatctttgagaagacaagtacaagaacacgttgtgcattcgaagtggcagcgcatgatatgggaatgggaacaacttatcttgatccatcaggttctcagattggaaagaaagagagcatcgaagatacagcccgtgtacttggaagaatgtatgacggaatcgaatatcgtggattcggtcaggaaatcgtagaagatcttgcaaaatatgcaggagtaccggtatggaacggtctgacaaatgaatatcatccgacacagatgctggcagatatgctgacaatccgtgagaatttcggagaactcaaaggccgcaagcttgtatacatgggagatgcaagatttaacatgggcaactccctgatgatcgcatgctctaagcttggaatgcatttcgtagcatgtacaacgaaagaatatttcccgaacgaagaacttgttgaaacttgtaaaggttatgctgcacagtccggagcaacaattactctgacagaagatgtaaaagaaggaacaaaggacgcagatgttatctatacagatgtatgggtatccatgggcgagccggatgaagtatgggagaagagaatcaaagaactttcaccatataaggtaacaaaagaagttatggcaaatgcaaaagatacagctattttcctgcattgcctgccggcattccatgacctgaagacaaagatcggagcagagatgggacagcgtttcggaatcgaagatatggaagtaacagacgaagtatttgagtctgcacagtccaaagtattcgatgaggcagagaacagaatgcatacgatcaaggctgtaatggttgcaacacttggcgagttctaagagaacgtaatcgcacatcgtgtgaacagtaacgcgcaatgtatttgatgaacttgagaaatcagcagaagtttggtatgataaatgagttgaagatcagaccggcttctgtggaaaataagaatgagcagaaggtgtctgttattccagagatgggacagacacctttcttttgtataaaggtctgatgagaggtggaattagaatgaaagctgaaatattaaaattattgagggaagcggacggatatgtgtcaggccagcagctttgtgaaaagttcggggtgtcaagaactgcagtctggaaggtgatccgtcagctgcaggaagaaggatatcaggttgaagctgtgcggaataaaggttatcatattgtagatagtccggatgtgatgacgaaagaagagctcgatagcctgatggatacgcagtgggccggaagaaacatcgtttattacgattcggtagattctacaaatctgaggatcaagcagatgggagatgaaggtgcaccggaaggtacacttgcggtagcagataagcagacagccggaagagggagaaggggccgttcctgggattcaccgtcaggttcaagcatttacatgtccttgttgcttcgtccgaagattgaaccggatcaggcgccgatgctgacgcttgtgatggcattaagtgtagcagagggaatcatggattgcggagattcctgtggaaacccagatgtaaagatcaagtggccaaatgatattatcattaatggaaagaagctcgtcggaatcctgacagagatgagcactcagatcgattacattaatcatgtaacgattggtgtagggatcaatgtgaacctgacagagttccctgaggagatccgtgagacagcgacatcactcagactggaatgtggacatgtggtaaagagagcaccgttgatcgcagcagtgatgaaacgctttgaacagaactacacggttttccttgaacatggagatctgtccggtctgaaagaacgttacagcgaattactggttaataaagaccgtgaggtccggattcttggcgcgaaagaacagtacaatgcttacgcacttggaatcaatcagacaggagaattgatcgttcggaaagaagatggaaccgaagaggcggtgtatgccggagaagtttcggtgcgcggcgtatatgggtatgtataaccaggtggataagacctacggaatgtgaataagtcatcgggattatgcagtgaatgtggaaaatatggaaaggtaagtactgtttacagaaactgtgggcagtgatataaggtgtaaaaattatggatgaagaaatggtattgtgtgcggccagctcctatgagcagaaatattatctgaacccggaatttgaatctcttccggaagcagtgaaacaggaattgcagatcatgtgtgtgttgtatacagcggatgttggaggagttctcctgttggtgtttgatgagaatggaaaccttgagttgaaagtagagcacaacgagggtgatttctcattcgatgagatcggaagtgtactgaagatcaaagagctgcaggacacaaaggaagagcttttcaagtctcttgaaatgttttacaaagtattctatcttggagaagagatggaagaagagacagaggaataaatagtcagataaatagattacggtttatctatcgaattttaaaactataaaaaagcccatggcggaatctgaatggtaagtttgttgaacttatcagaattcctgctatgggcttttgtttctcatagtttccgtttaacgataggtcactttttatccgagcaataacttcagaacgtcgctgacctttttcaccggagtgattttcagcttatcctttacttcagcagctacatcttcgagatcatctgcgttgtcaaaaggaatcagtatttttgtaataccggccctctgggcagccatcagtttctcaggaagcccaccgatcggaagtatacctccgcggagggaaacttcaccggtcatggcataatccgggctgacagcctttccggtaacaagggaagcaagtgctgtggttaatgtaatgccggcagatggaccatcttttggaacagctccttcaggcacatgaatgtgcagatcatgatcctggaaaaccttgctttctttaggataaagagacttcacaagtgtcagtgcaatctgtacagattctttcatgacatctccaagctgtccggtgatgatcacctttccttccccttctgtcagctttgtctctataaacagaatctcaccgcctgcctgtgtccatgcaagtccggtgacaacaccaggctgtgtggaagttaatttctggtcatgatgcagtttcttacggccgagatagtctttcagattcgatttatttactgtcagagtctgcccctcttttttaacaagacgcacagcagcggaacgacaaagcatatcaatctgtttcttaagtccacggactccggattccatcgtataatcttcaatgaccttgcgcaatgcaccatccgttatctttaacattttcttttggattcccatagcgtccattgcctttggaagtaagtgctttctggcaatatggaatttttccaccgccgtatatcctgggaaatcgatcacttccatacggttcagaagcggttcaggaatcgtatctgtagaattcgctgtgcagacgaacagaacattggataagtcatatggaacattcatataatggtctgtaaatgtactgttctgctccgggtcaagcacctcaagcaatgcacttgccggatctccgccataatctttcgcaagcttatctacttcatcaagaactacaacaggattggaaacgccgctgcgtttaatcccttccatgatccgtcccggcatagcgccgatataagttcttctgtgaccgcggatctcagcttcatctcggataccgccgagactgatgcggacatattcgcggtttaacgcacgggcaatactctgtcctatacttgtcttaccggtaccaggcgcaccgacaaaaaggaggatggaaccatactgtttccggttcagtgccataacagcaatctgctggatgatacgttctttgactttcttaagtccataatgatcttcatcaagaatctcttctgcccggtttaaatcaatcggtgtaaattccggatgcttccaggaaagactggtgacaaaatcaagatagtcatagagaagcccatattcatggctgtcttttccttcctgcttcatacgattcaggactttgtccgcttccttacgggcatcttcattcatgccggattcctggatctttttttcaaaagcacggacatcggaaatattttccgggtgcatctcatctaattctttctgaaggtaatcgatctgcttcttaattgcagcctctctgtaaagctgctcttggtcacctttctgtgcctcctgtgcttcagaagaaactttggccacttccatgaattccttaatcgcattctcaatcagttcacagcgctcacggcgggaatctgtctcaacaattgcatatttttcttcggaagtaatgttcagataatctgaaagagcagaaccaaggtcatagatattctttctctggataatgtagcttcttgcccagatcccccattgataattctgaacaaatttcagaagcgagttccgcaggtttgtgaaagtctgcttctcttcttctaaaggtagatcatctacctccgggcggatggaagctgtagctgtaatctgtccgttctcatccagctcaatatcatcaagactgacacgttctaatgtacgaatctggatgctgtcatcatcactgatggattcgactctcgcagacataccgaccgggtaaatatcatctatagtaacagtagtctcatccacttcatttttcaaaaatggaaacagaatatctgtaccgacttcaatctggtctgcagcagcccccggaaagaaatcacgtttaaaaaaataagtgatatcagggagcaataatatattaaaaacaggacgaataatcataaaaacactcctttcgtctcatgatttatcatatcatcgtcagcaattcaaaatggtgggatatgttgtgtaatgcaggtgccgcgaacagaaaactgcttacagctgtgccatcagaaagtttagcgatcccgcaggattctcagttcctttttccaaaagagagacaagagcagagattgtctgttcaatctcatctgctgttgaaggtattaaggtgttatccatcttaacagtcagtacaatcagtacgatctcagcaagagaaacagggtcagcacagcggattaaatcctgtgcaatcccttgttcaataatggaagcaagaaccggcttgagtgaaacgatgagatgattcatgtacttttgatgaagaaaagcccgctccggtgcagcctttgtagttgatggctgtgtctttaaaaaagccgcagaggaatttcggcaggcctgaaagatcagagccatgcgtgtgaaaggtgaaatctctctttgctctgcaagatgtcttgctgttgttattggagcttcataattgcgttctaccagtgcttcaagaattgcatctttggaagaaaaataataataaatacttccttttccaatttcagcagtctgagcaatctcactgacagagatattagaaagttctttggtttccagaagcttttgaagagcatccagaatcttatcgtattttaattgttttggcatagaagtccgcctcgtatattcgtaagtatatttggccagttccagattacgggaattgactgatatccttttaagtatagcacaataaagtcggaagaaccaataaaatagaaataaaaaagaggacaaaaaaaggacactttaaaacaaaagattgtctgaaatagataattgaccacgggtcgaaaaagtgatagattaaaaacatagcaaatcgaccatcggtcgaaaaatgaaaaactgaaaaggagagggagagaaaaatgacatacgcagacatgttttcaaaagtaaaagggatgatgatggaagcagatgtaagtactgtgaatgaacatcttgcatatcagttcaatgtaacaggagaagcagagggaatcttttatgcagaggtaaaagaaggaaagctgtatgtggaaccatacgagtattatgacagagatgcgatttttacttgttcagcagagacattatttaagatcaatgagggaaagctggatccggttctggcagtaacactgggaaaattgaaagtagaaggcaacattgataaagctttgtatctgaaaaaactgattgatagcagaaaagcagaacagaatgcaataaagaaaacacagaaacagaaataactgtaaaaaggaagcaaaggtgaaaaagatgatgcattacggaaaacttcttgcacttgcaggcctggtgggaatcgtatcagcagaggcaggtggaagtgcatacttttacagaagaacaatgatgcgttataacgcaaagacagaacgcacgatgaagatgtccggggtagactgggaacagtatttctcaaagatgaaggaatgcagggagtggatgatggagcagcctcatgaagatgtctggatccggtcggaagacagtttgaagcttcatggaacgtatttccggggatcaggaaatgtcgaagataagaaatgcaaaaaagcagtgatttgttttcatggctacacgagtcaggggcttgcggattatggaagtatttcaaattattatttgaagcgtggttataacgttcttcttgttgatcagagatcacatgggcaaagtgaagggaaatacattggattcggatgtaaggaccgttatgatgcatatcgatggattgaatgggtgattggacaggaaggagaaaatgttcagattttcctgcatggtaattctatgggaggcgccacagtattgatggcaagcgggcttgatttgccgcagcaggtaaaaggaattattgcagattgtccgtttacttcgcccaaggcagtgtttacacatgtacttcacagtatgtatcatcttccggcgtttccaataatacagattgcggatgcggtgaataaaaaacaggcaggatatggactggatgagtgcaattctgcccgtgaagtcagaaaagcaaaagttcctgtccttttgatccatggagacgcagatacatttgttccatgcagtatgtctgaagaaatttataaaaattgtaaatctccaaaacagaagctgatcatccacggggcaggacactgcgaaagttattataaagacagagaagcttatgaaggagcaatggattcatttataggaggaatcatagaatgatgaaaacaagaaaaggatatcctgtatacccactgacggtagcgcaaaaatttcatttgtattatctgccattttgtccgaatgcggcagtattgaatattggcacaagcctgacaattggcacagatctggattgggatgtactccgagagtccatttacaaagcatatgagagaaatgaagggatgcggatacgctttgcaaaggacaaagaggggaatgtatatcagtatgttgtaagtgcagagcaggacagaaaagaacgggagatagagttcgttgatttctccaatgtgactatggaagaggcagctgatacgatgcagaaatggacaactgtaccatttccattcgaggattcactgatgacgaaaattaaaatgatccgcacttcagatggattcaacggagtgtatttcctcggacatcatatggtggtagatgctcagtcgctgattacatttctgaaggatattattgagctgtactgtaatgcaaaatatgaaggtgtcccatatccaaaggatatgtgttcttacatagatcaggtaaagagggatctcgcatatgaagccggaagtaaagcacagcagcgagacagagaatttttcagggaactgattgaagcatcagagccggtttataacggtgttaatggaacagataagctggatgcagcgagggaaatgtttaaaaatccaaagcttcgttccgcatttaatgcgacagatgatgtgagttctgcattggatatttttcatttggaagcagaaccgaccaaacgtctgatggatttctgcgaaaagtaccgggtatccctggcatgtcttttattgatgggattacgtacttacttccagaaaatgaatggacaggaggatgtatcgatcaataatgcgattgccagaagggctacattaaaagaaaagaaatccggtggaacaagaattcattcgttcccgtttcgtactgtattttcagaagatgtgaagtttatcgatgcagtatatgaaatccgtgataagcagaatgaattattccgtcatgcaaattatgacccgacagaatatttcgcatatcgctccaggacatatccacagccacagaatggactgacgtatgagccgatgtctttgacttaccagcctatgacattgcaggagaaaggactggaagatcttggaggaattcaatataagacaaaatggtatccgaatggaatgacaacacaggcaatgtatctgacagtcatgcaccgaccggaggataatggattggatttcaactttgaacatcagaaaaaagcaatctcaagagaagagttggaatatctgtattactatttatgtaaaattatgttcaagggagcagaaaatcctgaacttacaattggagaaattataaagcttgtataaaagaaagatgatccggatcatgttgagaatcacgatcaggacagaatggaaaggaaaaaatcatgtttgagcagttagtagatattatttgtaattatgtagaaattgaacaggaagacatcaagccggaatcacgttttatggaagatcttggattcacatcctttgattttatgagcatgcttggtgaaatagaagacgagatggatgtggagattgaacaggacaaggcagcagttatccgaacagtcggagaagctgtagcgtatcttgagtctttgaagtagagggaaaagaaaatggaatatagaacaattcgcgatattcttacaaatgcagaaaaatgttttggaaatgaagacgcaatccgttacaaaataggaaaaaatgaaattgcggcaaagacatacacacagttgagagaagacagtgagagaataacagcattattgaaaaaattgggagatccaaaaagtcatatcgcattgatcggtgcgacttcttatctatggattgcttcctattttggaattgtggacggcggaaatgttgcagtaccattggatgtgtcacttccggcagaagaactgtgtgaacttatcgaccgtgcagatgtaacaatcctgattgtggatgagatccgtaaagatgtgattgaagcagcgaaagaaaagtgtacaaaactgaagtacatcctttctatgcagaaggaagcgaatgagggtaatatactttctcttacaaaatcaatgatggaacaaacgatagatgaggacacaggagtagaaaaaacagagattactccggatcaactctgtacgatcatgttcacatcagggacaacaggaaagagcaaaggtgtgatgctgacacacagaaatctcgttgagaacgcgacatgtctggatatgaagctcccagagagaaatgtgatcctgtcagttttaccgattcatcacgcatactgcctgagtatggatatcctgaaaggaatttctctcggtgcaattatctgtatcaatgactctttgatgcgtgtagcaaaaaatatcaaattatttaagccgaatatgatcctgatggtaccgcttatgattgaaacttttgcaaaaaagttagaagatgtaaaagaccttccggaaaaagtggtaaaagaagcagtatttggatctcagttccatacgatctgcagtggaggtgcatacctgaacccggattatattgagctgttcgaacgttttggaatccagattctccagggatatggaatgacagaatgttcaccggtcatcagtacaactgttgcatggaatgtaaaaaagaattcagtaggacaacttcttccaaactgcgaggcaaagaccgtagatggagaactgtgggttcgcggaagcagtgtaatgcaaggatattacaagatgccggaagaaacaaaaaccgcactgaaagatggatggctttgcacaggggatctcggatatgtagatgaagaaaggtttatctatctgacaggacgaaagaaaaacctgatcattacaaagaatggagaaaatgtctcaccggaagaactggagaataaattaagttcttcaagactcgtacaggaagtattagtaagagaagcaaaaggagtgatcgaggcagaaatatatccggatgaagagtacgcaaaaaagcagggacttgaaagaaaagaggaagtccgtgtagaactccaaaaactgattgatgaatacaatcagggtgcaccggcatataaaaagatttatagtctgatcattcgcgagaaagaatttgagaagacagcttcaagaaaaatcaagagatattaaaagacagataaaaaagtctgaataaatggaggattgcaaaagctttgtgattgccggatttattcagacttttttgtgtgaatgcgaaagaacagatcgtgtacgttgacttttcggcagttatttactatgatactaaagtcaaataagaagaatagttatagattagaaagaatagaatatgatgaaacagttgaaaataggaaatgtgacgctgccaaaccgttacatcttaggaccgatggccggagtgacagatcttccattccgtgtgttgtgtaaagaacagggagcaggtcttttgtgtatggagatggtcagcgcaaaagcgattttatataataataagaatacagaatcacttctggagatccacccggatgaacagccggtgtcactgcagttttttggatcagatccgaagattatgagtgagatggcaaaacgtgtggaagagcgtccatttgatattatggatattaatatgggatgtccggtgccgaaggttgtacgtaacggagaaggctctgcacttatgaagaatccgaagctggtttatgaaatcgtcagtgcaatggtaaaggcaattgataagccggttactgtgaagataagaaaaggatttgatgacagctgcattaatgcggttgagatcgcgaagatcattgaggaggccggggcagcagctgtagccgtgcacggaaggacaagagaacagtattacagcggacaggcagattgggatatcatccgtcaggtaaaagaagctgtctctattccggtaattggaaacggagatgtgacaagcccacagaaagcagaggagctggtaaaacagacagggtgtgacggaatcatgatcgcaagaggagcacaggggaatccatggatcttctccgagatgatcacatatgaagagacaggcacattaccagaacgtccgggaaaagaagaagttcgagatatgatgcttcgtcatgccagattacagttgaaatacaaaggtgaattcattggtatccgcgagatgagaaaacatgtggcatggtatacaaagggattgaaaggttctgcaaaattgcgtgaagaaatcaatcgcgtagagtcctatcaggaactggaagaactgctctttcagagactataggaaaagaagctccgggacttcggaaaacagttggaaaacagaatggaaaaagttcggaaaaaggcggttttaaaggcttttcatacactgcgtagaagtgacctgtgagagtgaaattgcttgacagaaagcgcgagtttgagtataatattgaaattgcggacggacgctgatacaacgattggcgtccaggagaaaaagacagcagacatgcattttaaaactcacattataatatttgtagacaaaatatagagaaggaactttgaatgcatgaaaagtatagacagaaaatgatttgcagagaatctgtaaatgttgtaggaaacgaaacgttattgcaacaggcagtgacggtaaggaagtagaaaggaagcaggaacaatggcagaggcaaaaaaaagattacttacttatgccggattaaaggcaattgaggatgaacttgagaatctgaaagtagtaaagagaaaagaagttgcaggtaagatcaaagaggcaagagagcagggagacctttccgagaacgctgagtatgatgcagcgaaagacgagcagagagatatcgaagcccgtatcgaggagcttgaggcaatcctgaagaatgcagaagttgtagtagaggatgaagttgatcttaataagatcaatgttggatgtgcagtaaaggtttacgatatcacatttgatgaagagatggagttcaagattgttggttctacagaggcgaacagtctggaaggaaagatctccaatgagtctccggtaggtcacgcactgatcggaaagaaaatcaatgatgtcgttgatgttgagacacaggcaggagttatccagtacaaagtacttgatatcaaacgttcataatcagcttaggacagacctcttactattaagaggtctgaattcgcttaaaaagacaatataaaaataactatttctgcattgatatataaaaattaatgcggaagcagatagaaacggaaggagaacagacagtgggacagaatcagaagaacacacaggaaccagatatgaatcagctgaaaaaggttcgccgtgagaaacttgcagaactgcagcagaacggaagagaccctttccagattacaaagtttaaccagacacaccattcactcgaagtaaaagatctctatgaggcacatgaggctgagattttaaaagatcaccagcagccgaacgtagaaggtatggatgaagagcaggcaaaagaggctctcaagaatgattacgaagagagaagaagcatcatggatgcaagcccgattcacgtagcaatcgcaggacgtatgatgttcaagagagttatgggaaaagcttctttctgtaatatccaggatttacagggaaacatccaggtatacgtagcaagagatgcaatcggaacagacgcttacgctgatttcaagaaatctgatatcggtgatatcttcggacttgaaggattcgctttcagaacaagaacaggagaaatctctatccatgccgagaagatgacacttctctccaagagcttacagatgcttccggagaagttccacggcctgacagatacagacacacgttatcgtcagagatacgtagacctgatcatgaatgcagactctaaagatacatttatcaaacgttccaagatccttgcagcagtccgtaagtacttaagcggagaaggattcatggaagttgagactccgatgcttgtagcaaatgccggtggagcagctgcaagaccgttcgagacacatttcaacgcactgaatgaggatctgaagcttcgtatttcacttgagctgtacctgaagagactgatcgttggtggacttgagaaagtatacgagatcggacgtgtattccgtaacgaaggtctagatacaagacataacccagagttcactctgatggagctttaccaggcatacacagattaccacggcatgatggatctgacagagaatatgtatcgttttgttgctcaggaagtccttggaacaacacagatcgtttacaaaggaatcccgatggatctcggtaaaccgttcgagcgtatcacaatggttgacgcagttaagaaatatgcaggcgttgactggaatgaagttgagactctggagcaggcaagagaacttgcaaaagagcataatgtagaatttgaagagagacataagaaaggtgacatcctcaacctcttcttcgaggagttcgtagaggagcatctgcttcagccgacattcgttatggatcacccggttgagatctctccactgacaaagaagaaaccagagaatccagaatatgtagagcgcttcgagttcttcatgaatggatgggagatggcaaatgcttactcagagctgaatgacccgatcgatcagagagagcgtttcaaagcgcaggaagagctgcttgcacagggagatgatgaagccaacacaacagatgaagacttcatgaacgcactggagatcggtatgccgcctacaggtggtatcggattcggtatcgacagaatgtgtatgctgctgacaggagcagaggcaatcagagatgtattactgttcccgacaatgaaaacagtgggcgcaagcgagaataaaaaaggtcaagaatctgcaacagcaggagatgacaataatggattttttacagcaaacgaaaagattgatttctctaatgcaaagattgaaccaatctttgaggaaatggtagatttcgaaacatttgcaaaatctgatttccgtgcagtgaagatcctggcttgcgaagcagtaccgaagtctaagaagcttctgaagtttacactggacgacggagtacgcaaggatcgtgtgatcttaagtggtattcatgagtattatgagccggaagaactggttggtaagacagcaatcgctattgtgaacctgccaccgagaaagatgatggggatcgcttccgaaggtatgctgatttcagcggtaaacaaccttaagaattcagaggatgaagaacttcatctcctgatggttgataaccacatcccggctggtgcaaagttatattagaataaaaaagatcaagatgctttagggcgaaaaagtgtttactacaacgcttactacaacaaattcgtaatttgagatgaagaaatatgggctcaagtgacggattgctctaaagagtattgggaaaaggatataaaacaggaatctttccttcagaaataactgaggagaggttcctgttttatttgtagtttccaaataaaaaagaagaacttgtgatatggtaaaaaaattatgtgaatttggagcgctctatgataaagcatagagcgcaggataaaatgagaggggattaagtgtaatggagaaattaaaactagatttttattacgggagagaagcagagcagtttacattttacagacttccgaaagctcttatcacagatgcacgttttaaaggaataacgaataatgcaaagcttctttatgggttaatgcttgatagaatgtctctttcaaaaaaaagaggatggcttgatgaagcaaataaggtttttattaagtattcccttaacaatattgaagaagatttaaatgttagtcgaaagacggcaagctctcttttgaaagagctggaagaaattggtcttatttatatgattcagcagccaggagtagcaaatattatttatgtaaagaactttgtatcaaagagagaacaggatttttgcgatcagagcaatcctgtggttaagtacaaaaaagaaactaaaccagtggaaaaagtacaccagtgtaaaaattctactggtgaaaaaactacaccagtagaaaaaagtaaccagtgtagttttgaaccggggagtagtgaaaaaaatacactggtaccagtggaaaaattacacccgagtaatatagaaatagataataatataaataataataattctatcaatcaatcatatcagtcaatagataagattgatgtgatggatgaaacagcagtatatatggagttaatcagagaaaatattgattatgatattatgatgctagattatgaatggaagcatcgtgacatgtatgaagaattgtatcagatcatctgcgatgtagtctgtgtacctagacaagaggtccgtattgctggagaagattatccgtatagcttagtgaaaagtaagttcctcaaattgaaaaaatcgcatttggaatatgtgatcggatgcatggaaagaaacacaacaaagattgcgaacattaaagcatatctgattacggctctatataatgcgccgaatacaatttgccactatgattctgctgaagttaattatgatatctccatttgagtaaagaatgtagatctatttcctacgatgcaatgacagcccataccgcagctgtctttaccagatatatgatgttatccattgaaaaccgtgaatcaagagatgaacggtctcttggtgaacttttttatatttttccgatgaaatgtctgatatcacatggatacaggtttttcaattattgtcagggagtgaattttcaaagtgcataagcaaaatttatgtgcgagtttgaatatttaacatatatttcacagaaacaagatagagagacagatctgaaatctgataggataactctcggacatcaatgaactaaaaaagaaaacagtgattctaactgcgaaggaggagaataatggcagaaatggcattaagaaatgtctgtaagcaatttgattcagcacattacggggttaagaattttaacttggatattcatgataaagaatttgtaatatttgttggaccttcagggtgcggaaaatcaacaacattaaggttaattgcaggtttggaagaaattacagatggtgaattgtggatagatggaaagctgtgtaattatctggaaccaagagaaagagatatgtctatggtatttcagaattatgcactatatcctaatatgacggtttatgaaaatatatcatattctttgaaaataagaaaagtgccgaagaaggagattgataaaagggtaaaggaaattgcaaaaatattagaaattgaaccgcttttgaagagaaaacctgtagcattgtcaggaggacagaaacaaagagttgctattggagcagcaattataagaaaaccaaaagcatttttgatggatgaaccattatcaaatttggatgcaaagttaagagctcaaatgagagtggagctaaagaaaatacataatcaattagatacaacaattatctatgtaacgcatgatcagacagaagctatgactctcggaactaaaattgtggttatgaaagacggcgaaattcagcaagtggatacaccacagaatatttatagtaatcctattaataaatttgttgcaggttttgttggttcgccttcaatgaattttattgcatgtgatgttgaggaagaagcagggaaagttgttttgatttttgcgattaataatgcaatcaaaaagatttatccgaataatcatgatgcacagcttattagagaaaaatatatgggaaaaagagtgattcttgggattcgtccggaagatatttatgaatatgaggaagcaaaaaaaagaaaaatcgatttgaacagtgtaggaattgaagaagagatagtgacccgtgaaatgcttggggctgaggtaatgctatattttgaggagcaaaacagaacacatgcagtgaaattaggtcctgaaaacaagactcgtgttggagaaaagatacagttattttttgatacagaccagattcatatctttgatattgaaacaggtaaaaatattttatatagggaaaggaattaaaaatgaagtcaggaaaaaaaattgaatttgcaccatattgctatctggtgcctagtatgctgatatttgcagtttttttattctatcctttttttaagactatttatttaagcttatttatgacgaataagatgggacaggcaaaattatttgtaggactacagaattacattgatttacttagttcaaaatcatttcagaacagtttaaaagtaacagttgtttttgttttgattgttgtagttggtggaatgttactaggattagtagctgcggtgttgtgtaataaagcatttccaggaattcgtgtgtttagtactgcatatgcacttcctatggcaattgcatctagttcagcagctatgatttttcaaattatgcttcaccctacggtaggtattgtgaataagcttctcggattagatattaattggttgaatgacccacgtacagcgttgtattgtgttgcgattctgacggcttggcttaacagtggaataaattttctttacttttcagctggtttggggaatattgatgaaacaatctatgagagagcttctgtagatggagcaagtggagtgcaacaattttttcatctgacactcccaggattgtcgccgatcatgttttatacagtggttgttaatatcattcaggcattccagtcatttgggcagatcaaaattttgacagaaggaggaccaaatgaatcgacaaacgtaattgtctattcaatttatagagatgcgttttttaattatcgttttggaagtgcctctgctcagtctgttattttgtttataattataatgcttataacacttgtaatgttccgaatggaaagaaaaggggtaaattactaatgaatcagattgatagtatggcaattccagtggaaggtcgtatgacaacagaagaattatttgaattaaaaaataagatgaacacaaaagcgcttgcaaaaagaaggagtaaaacagttttgcgtatcgtagcaaatattgtattcgcagtagttattttacttccgcttttgtatgcaattagtattgcatttatgccatcaaatgagttgtttacaacagaattgaatattgtaccaaagcatccaacagttcagaattttattgatgcattgagaacagttccgttattgcgttttattgtaaactcgtttataatggcaggttttataactgtagggcagataatttcttgttctttggctgcattttctttttcgtttttggaatttaaaggaaaaggaattctattcgcaatagttatggcaactatgatggtacctggagaagcaacgattatttcaaactatttaacggtggcgaaccttgggatgttagacacctatccagttctgattattccatatttaacatccgcaatggggattttcttattccgtcagttttatatgacattcccaaaatcattgtatgagtctgcaaaattagatggatgtacaaaccttaagtttattgtgaaaatattaatgccactgacgaagtcagcaataggagcgatggcagtatatacgtttattaatgcatggaatatgtatatgtggccattacttgttacaggatcaaacaatatgcgaacagttcagattggtattagtatgctggacagcatcgattcccagtcaataacattaatgattgcaggtgttgttatgattattatcccgtctatttcaatttttatcgtcggacaaaaacagctgattcgcggaatgttttctggagcggtaaagggataacaatattaaggtaggagcggaaaggtgtaatagaaagcatcatttctgaatctataaataagtataactacaaaaaacaaaaataggagagtagaaatgaagaagaaactagtatcattattacttacagcaacaatggtaatgggcgttttgtccggatgtggaaatggaaaaatgtcagtaagtcagaccggtgatacatctacagatgaaaaggtggaaatgacagcggcagatgatgttgacggaacaacaattacattctggcattctatgggtggcgttaacggacaggcaattgacacactggtaaataaatttaatgaagaaaatgaatatggtatcacagtagaagcacagtatcagggggaatatgatgattccttaaacaaactgaaaagtgcgcagattggaaacatgggtgcagatttggtacaggtatatgaaatcggaacaagatttatgattgagtctggttgggttgttccaatgcaggaaatggtagatgcggataactatgatgtgtcacagatcgaatcgaatcttgcagcttactatacaattgatgataagctttattctatgccgttcaactcatcaacaccaatcatgtactacaataaggatatgtttgcgcaagctggaatcacagaagtcccagatagtttagaaggcatttcaaagattggcgatcagctgatgaatcaaggtggtgcaagtgaagtaatgtctcttggtatttatggctggttttttgaacagtttgttggaaagcaaggactggattatgcaaacaatggaaatggacgtgacgacgtcgcaacagccgttgattttgataaaaacggagctgcaaaaaatattttgatagaatggcagacccttaatcaagaaggatatgcaccaattgttggaaaaggtggagacgcaggattggcagatttctcagcaggaaaatcagcaatcactcttggttcaacagcatcactgaaacagatccttcaggatgttaatggtaaatttgaagttggaacagcatatttcccgaaaatcaaagagagcgatgaaggtggagtatctataggtggtgcctctttgtgggctttgaataatcaggatccaaagaaacttcgtgcaacatgggaatttgtaaaattcttgatttcaccagaatcacaggcttactggaatgcacagaccggatatttcccagttacaacagcagcacatgaagagcagaccttcaaagataatattgcacagtatccacagtttcagacagcaattgatcagttacatgattcttcaccagaatactgtggagcattattaagtgttttcccagaggcaagagcaactgtagaatctgagattgagagcatgcttaatggaaaagaaagcgttgatgaagccgtaacaaatatggctgatacaattaataaatctattgatgattataatacagtaaataattaatatctgcgaagaaacaagactgtaattgcaatcgaataaatgacagacagagaatcagggacaaagaaagtccctgattcttccattactattgataatgatggattatattaaaaaaagaggaaaacaaatgacagagatatttgcacatagaggagcaagtggatatgctccagaaaatacgatggatgcgttcaaacttgcagttaaacaaggagcggaaggaatagagttggatgtccaactgtcaaaagatggaattccggtagttattcatgatgaaacaattgatcgtgtaacaaatggtcatggatatgtcaaggattatacgttagaagagttgaaaaactttacaataatgaaaggaaaatatcaggaatatgagcattctaaaataccgactttggaagaagtgctggtatatgcaaaaaaagaaagcttgaccgtaaatatagaattgaaaacaggcatatattggtatcctgaaattgaagaaaagaccgtggatcttgtgaagaaaactaaaatggaagatcaagtgatatattcatcctttaatcattacagtattaggaaaattaaagaaattgcacctcaggcagaaacggcctatctatatagtgacgtgattctgcagattgataagtatgcaaaaaatgaaggggttaatggtttacatcccgcagtttatcatgtgaagatggctcattttttgaaagaatatctgcagagcggattaaaagtgcgtgtgtggacggtaaatcaggaatcagacctaaagatgttaatagattcaggaattacggcggttattactaattatccggataaagcgcgaatgatacgagatgaaagtgagagagggtagatgcttggagataaaaaattatttctgttagatatagatggaactatttgtaaaggaaatcagttgattggaggtacaaaagaatttttgagtgatattgaaaaaaatggtggaaaatatatatttattaccaataacgcaactcgcagtattgatgattatattcttttttttcaacaacttggaattatgacaaatcacagtaatttcctaacagcatcttatgcaacagtatattatctgaaaaaatatcatccaggagaattgatttatgttatgggtacaaaatcatttattcgagaactaaagaaaaataaaattcgtgttacgacagattgtgaggatgaagagattagttgtgttttaatttcatatgataatcagctaacttatgaaaaaatatctgatacatgcaggttgcttagtacgaagaaagtggactatcttgcgacaaatccagattatgtatgtccgattgaatttggatatgtgcctgattgtggagcaatttgtgagatgcttaatcacgcaataaaaagaataccccattttattggaaaaccagaaccagatatggttgaattggcaataagtcgaaataactatagaaaagaagagacattagtggtgggagatcgcttatatacagatatgctttgtggacacaatgcgaaggtggaaactgcaatggttttaactggagaggcaacgaaagaagaagcagaaagttgtccatatgggccagattatttgatgcagtcggttgagagtttacataaaaaatggttggaagagataacatagtatagaagaataaaatactcaaactttacacatgaattttgcttatgtaccttgaaaattcgtgagtggaacttttggtcaacttgaccaaaagttgtacaatcgccaattagaggtttgggtcttagggaaaaatccctatcgcacatgacataggaaagtgccatttgttggcataaaggcatgttactttatgcgtatcctgttagtaatggttagcgattattgttccaaaggttggatttttgttccaacttctggaaagccaggaaaatcaagggtttgagtgtggtccaagagttgaactaatgtgaaattgagggattattttacatcccagattttgtatgatccaaagtgttggacagtggcacggacaatgaacggatccactgttcaatactttggatcctggctgaattgttatatgatataaaaagtgtagtttttagaaaatcttttttgtaatcagctttttatggctccaagtagatattagaggtgaggaaacaaacctactaatatgagaaaggagcctttttatgagagaacagaaaaagcaaaatcttacagatcctaacgtgagaaaaagatttgttacttacaaggaagcagcggaactctatagtatgggactgacgagaatacaggaacatacaaagatggcaggagcaacttataaaatgggtaataaggtgcttgtaaatacggacatctttgaggcgtatcttgaacaatatagaattccaggagattatgaaggaatggcaaagaagtttactccagatcttgtggaattgtaccgataattatctcgaacaaatgttaaacaaatgttgaacgtttaatcattctattgtataatatttgtatgatgattcggggaggtgttaagcttatggcaaataaagacgggagaccgccagtggatgatccaaaacagaaaatcttaggggtgcgggtaacggtcagtgatcatgagcggattaagaaatacgcagctgagcatcataagacaatatcacaagttgtaattgaaggtctagatcttttatgtaataaagaagaaaaagacaactaaaatggacaactactttcctttccgagaaggagagtgaaagcaatggcgaaagcaaaagtaaagcagaggaaggacagcaaaggacgagttcttcaaaagggcgaaagccaaagaaaattagatgggatgtacatatatacatatgtgaatccctatggaaaacgttgttatgtatattccaaagatctttttacactacgagagaaagaacaagagttaattaaagcccagatggatggattggattactatgtaggtggtcatgcgacaattaacatgacatttgacagatatatgagtacaaaacataatctgagagaaaccacgagatccaattacctgtatatgttcaatcgattcattcgagcggatttcggaaataagtttttgactgaggtgaagtatacagatgtgaaattgttttattatcatctgttaaatgagaaggatattgcaatcaatacattagatacaattcatactgtattacatccaatctttgatatggcagttagagacgacattattagaaaaaatcctacagacggagttctggctgaaattaaacgaaatagtggaaagaataaagggattcgacacgcacttacaattgaacagcaacaagcatttatggatacgatcagaacatttcctgaatattatcactggtatccattatttgcaacattacttggtaccggaatgagaatcggcgaatgtacaggattaacttggaatgatgttgattttaaaaggagatgtattagtgtaaatcatgcagcaacctattatacaagaaatggagttgcaggatttgcgatttcaagaccgaaaacagaagctggtataagacagataccaatgatggatgcagtctataatgctttgaaaaatgaatatgacagacagaagaaagacggattttgtacctatgagcttgatggtgtttcaggatttatattctcaaataaattaggtttgcttcataatccacattgcgtaaatctggcaatcaaaagaatctacgaagcacataatgcaagagagattatagatgcgaagagagaacacagagagccgatcattatcccacacttttcctgtcatgtgttgagacacacattctgttcacgtttatgtgagagtgatatgaatgtaaaagttattcaagagattatgggacataaaaacgttgaaacaacattagatatctatacagaagtcaattataataagaaaaaagattcattagaagaattagcaagtaaaatgcaattcttttaatctcagaaaagtaaaaggaaaggaattcaattccagtacagccaattttgagatttgaatctaatataatggaaaaatcattatacaatgagtactacaacaaaatagctttggtacaacgcaaagtacaacaaaagggtaatctgatacgacctgatataagtttatatggagaactaaaacgtatatgaaagctataaaataaagggatttacagagatataacgagtatctataaagtaatcccgacaatgaagagtcttgactctgacaaaaaagcaggaaaatccggagcagtagaagaagcaactgcaaacgacaacaacggattcttcaaagacaacgcgaagattgacttctccaacgtaaaggctgagcctttatttgaagaagaggttgatttcgatacattcagcaaatctgatttccgtgccgtaaaggttaaagagtgtgtagcagttccgaagagcaagaagctccttcagttcacactggatgacggaacaggtacagaccgcacgatcttaagcggaatccactcttactatgagccggaagaattagttggtaagacactgatcgcaatcaccaacctgccaccgagaaaaatgatgggaattgaatcttgtggtatgttgctttcagcagtgaataatctgaaagattcagaggatgaagaactgcatcttattatggttgataatcacattccggcaggcgcaaagttatactagaattaaaagatatcaaaattcagaaaaataaaatcattgatttaaagagaacacgtttagttaaaagtagcagacaattaatgcctgctactttttttataatagttatatagtttggatgaaatcacggagatattctgtaaattaggacttcgtatttgtaacagctttgctgatttcagtggaaagccgagttctgataatgatattcaattgatggtttattccatacgggaataaatcttcatcaaatctttatttttttctgttaggttatatttcagtaagaaatgaaatatagaaggaaggatagtaaagatggaaatgatgttacagacacaaaatctatgtaaatattttagaaaacagaaagcggtaaataatgtttcacttaatatcgaaaagggacagatttatggactgcttggaccgaatggcgctggtaaatctaccacattgaaaatgctgaccggtatgatgaaaccaactgcaggaaagatttactttgatggaaaacttttggataggaaagatttatcaaaaataggagcgttaattgaaaatccgcctatttatgaaaatctttccgccagagagaatttgaaggtaagacaattattgcttggtacagatgaaaacagaattgatgaggtcttgcagattgtatcacttacaaacaccggaaagaagaaagcaggacagttttctttggggatgaagcaaagactaggcattgcaatggcattgcttggagaaccggaacttttgatattggatgaacctacgaatggattagatccaataggcatcgaggaattacgagagctgatccggtcttttccggaacagggaatcactgtaattctctccagtcatattctctcagaggtacagttacttgcagataaagtcgggattatttcaggtggaatcttaggatacgaaggagcattaaggcagggagataatcttgaagatttgtttatgaatgtggtaagaaaaaaccagaaagcaggtgaaatccatggttaatattataaaagcagaacatcaaaaagccaaaagaaccatgcgaaaaaagtttatcttgggatttcctcttcttacatttgccatggcatttatatttactcttgggatgacaaatgcttatgcagaaagtgtttggaactggtggtatacacttttgctgccggggatgattgctctattttgttatctttctgtggcgcaggagaaaaagataaaatactatcatttaatgactattcccacagacataagaaaattgttgctggggaaaattatttatattgggtacatgattttgttttctaatgtgattgtgtttgcaggagcaacgcttggaggctttcttctaacgacacatgttccagttggaggagcgttgattgcagtattgtttctgacggtttctgagttatgggagattccggtagctttatttttaagtgaacgatttggaatgattgtaaacctgttcgtctgcctatttattaccgtcagcggtgtggtaatatcacaaaccagaatctggtatgtacttgtttctgcaatccctatgcgaatgatgtgcccgttgcttcatgttttaccaaatggacttgccgcagaagcagggaatcctcttttggatacgggagtcattgttccgggaatgtgtctctcaatcatctggtttgtttttgtaacggttctgtttttgaaatggtttgagagaagagaggtgaaataagatgattggaagatctcttaatgcagacttgcgaaagatgaaaggaacatctgtgattctggcacacttactgattccgattataaccagcgttatatttttaatatattactttttttcaccatggaatgaaaatatgaaagtgatcgcattttatcaggcaataggagcaggacttccggtacttattggaatttttacagcaagtgtgatggaacaggaacaaaatgcaggtgattttcaaaatctgttgtctttaccggataaacctgcagcatttttatcgaaactgttgatgctactggttttgtgtttgtgctctatcctattgacagcaatcatattcggaattggatttggaagaatcgcatcaagcgatatcgaaatcatgaaaggatgtatatttgcagcattgctgctgtggggaagcagtgttccactttatctgtggcagctgattctggcttttcagtttggaaaaggggtatccattggagcagggattatatcaggactaattagtgcattgatgcttaccggacttggagattatgtgtggaaatatgtatttgtctgctggacgggtagagtaccatatacttatctgcaatctgtattgggagaaactagtgtaggtgaatggttgtcattcataccaggttgcttaatatttacagggattagtatggtatactatttttggtgggtaaaccactgggaaggaaacagaatatcggaatagaatcgagggaaactatggcaaaaatactggcagttgatgatgaaccggcaattttggaaatgatagaaagcattttgaataaggatggacatctggttaccaaagtaagtaatccactaaaaattaatatggaagaattacatcgttatgacctgattttactggacattatgatgcctggaattgatggcttcgaattatgcaaaagaatcagggcacttgtggattgtccgattttgtttcttacggcaaaaacggaggaaaacagtctggtaaacggactttctttaggagcagatgattatatttcaaagccatttggagtgatggaacttcgggcaaggatcaatgcacatcttagaagagagcacagggaacattctgtccggatggttttggggagggtctgtattcaaatatctcaaaagaaactattggttgatgataaggaacttcctcttacgaaagcggagtacgaaatctgtgaatttctggctaaaaacagaggacaggttttctcgaaggaacagatattggaagcggtctttggctttgacaatgagagtaatgacagtactataatcacgcatatcaaaaatataagagcaaaatttgcggattatgattatacaccgataaaaacagtctgggggattggatataaatgggaagagtaaagagaagcaatgcactcagcaggatttttatgagatatgtactggtcatgcttggatcattagttggtttggtgattgttgcttatctgctgctgtaccttttgattagtgtgggctgtatttatccggcaaattatgcagagcaaaagattaatgaagcatatgatacgattctacgtgcagataaagtgactgctgagatgattcccgcactttgtgattatgtaatcttttcagagaatggagagaaaataggtggagatctgtcagaacaatacgaacagatagcatggaatgttgcaaagtacggaaacgcatccgggaaatatttttataaagtaattgtaagggaaaatgaatatgttgtattgcaatatcgcctgacacctcaatatcattcagcttttttgagggagcattttataggaccacagaatgtgatgattattatgtctgtgattggagcggtagcgattatcatcattccgtccatacgttttggaaaaagaatcaaaaagcagatgcagcctgtattagacgcaatcggacaaataaaggatcaaaatctggaatatgagacatcctgttccggtatcaaagagtttgatgactgtttatcggcaatcgatgatatgcgagatgcattgcgagaatctttagaaaagcagtggaaaacagagcaggaaaagaaacagcagatgtctgctttggcgcatgatattaaaacacctcttacgattgtacggggaaatgcagaactactttcagagactgaactgaccacagaacagaagaataatatcacttatgttttgaacggcacaacacagatacaaagttatgtaaaacagttgatagatgtcacaaaatcatggaattgcagtgatgttacctatacaacggtgaggttagaagattttttcgcagatataaaggaacaggcactcggactggtagaaatctatcaccagaaaatagattggaaggcgggacaaagtgataaaaaggtaacgattgcttatgatccaatgttccgggccgtaatgaatatgattcagaatgcagtggagcatacaaaagaaaatggaatcatttatattgacgcaaaggagcaggatggccgtctgacattcattgtggaggatagcggatcaggatttacaaaagaagcattattgcatggcacagagcagttttttatggatgacacaagtagaaatggcgaagcccattatgggatgggactattttttgcaaaaactgtggctgaaaaatatggtggaggtattaaactttcaaattctgaaaatacaggtggggcgagggtagaaatatttttcctgagtagtcaagaaacaagctaaatagaccacaattaagctatgtaaaagaaattttacatgtttttatctaatatgtaaaagccttttgatatacattactactactctaagcacaaggaggttgaggtttggctatgaataacagtttagcagacgtactgatgtgatattgatatggaaagtggaatgattgatgttaatcatactcttgtatattatgaccacagaaccgagggaagtaaaagtggctgttatttcaatgtaaatacaacgaagactccggcgagtatgaggcaggttccaatgctcggtaccaagcaacattcaacaaagcaatccgaagaattatccgtgattgcaatgatgagcagtttttacacagtgatgaacctgatgtgttacttcctcattttagctgccactcgcttagacatacatttacaacaagaatgtgtgaagctggagtaaatataaaggtcattcaagacgcactcggacattcagatatttcaactacactgaacatctatgctgatgttacaaaagaaatgaaagcggaagagttcaaaggattggatagctacttcaaagtataatattggacttcacatacagaaagagaacatacagagtgttgtgtgttctttttttcgttggataaaaagagaaatgcttgaatgggatatctttatgtatctttaaacgcccaaattagaaatattactcttcttcactcttcttcaacttcgaataataactatccgcagtataaagcgccgccaccggattatgccccaatacacggtctttcgtcactgctgtcgtagtcagtgcctcggaatatttgtaaaacagactgtcatgtcccacacaaagtccgaccacaacattcaggtccgtcttcgccttgttcagaagctttgcctgcaggatcggattacacatattcacaccgacaccttcgcagcattcagggatgccgaccgatgtcttcttctgtgttccggctttacagccgacaccatacacctcaaagccatgtctgcgcaggatatctgccaggatacggctttctttcaacaatccgacacaggttgcgatcccgatctttttcgcattaatcttctttgcaaaatccatgatttcttcgacacgggtatgtttgcagtaattctcatactctacttcagctgcagcgattgttactttgcggttctcgtcttcattgtagcattccatagcttcatttagaacttcttcatccatgtgtgttgtcagacagaaatccggataggttttatccattttgttgcagttttttactgcgcagtcgatacaggacatgtcttcttttttcattttttcattctccttttgtataccttggtatctacagaggccttccactggcagattctctagattaagctttactttgtaaaatatccgctatttacttcataataacaaatacttatactacagacaatggctttccgtttttattttcttattttttgtagttcttttctatgagaaacgttccccgattcagggttgatttgtcatgaattgtcgattctgatttttgaaaaattattgaaaattatctttttcaatacctcagccgaataccagctacatggaagccaataaaccatgcaacagcggttcttttattcgccagtatatgcaatttctatctcatagccgccgttctcatagtaggcgtgggaaaaatagtatcttattgttatttctgaaatataaaatttgaatcataaaacttcgttccctctcaaatccatttttaccaaaccaactactaacaatccaataaaaattgccgtgtccataaataacagtacaacaacaccttttaccactccgaaagtaaaaagtatggagaagatttccactgacaacacaataaaacacatataatttgtcaaatactctgttataatttctccataataattgttcatctgcaatttcgcatagataaaaggttttaataaataacggattatgatacatataacaggacaaataaaaatccagtttttattaactagggatgttgccactcctttactccattgtactggaatttctgtcggcaacttagaataagacaaagccccaataatcaagcatagtgcggtaatcatagtccaggtaagcatacttccccatatatacaaaaagctgacggaatccagtttgaaaacagttcgattatctttccaatagtcatgcaaatctgttacatattgttctacctgtaatttttcataactaatactttcttcatccagcattttttcacacatgagtttcgccttattcaaatcagtaatctgattttttaatacttccttttgcttctcaagcatttcctgcaatgttactttttcggatataatacttcgtatatcttcaatagaaattcccaatgtacgtagatatgcaatcttctttatattttccacatcattttcagaataatctctataaccattactttcatttctcgaaggctcaataagtttttccttttcataaaaacggatattagaacgggataaacctgttcgctcttctacgtcttttatagtcatattatgccctcctttcgagcaactctattttacttaataataagctataaacaaggtttacagtcaagcatttatcaaaaactaaaaaaaacagcaaaatttgtttcaggatttaattcattttctaaagaagaacaggcattgtatgataaagctcatatctctcgtgatataagaaatcagtgctttatctgttattaagggcagagggacaaaaagcctctctgcccttaatgaacaaagcacgttcttttagaaaaatttagtcgttgacagataacatatcttgcattataatacatttaacaattaggttaaatgttaaatgaggagcgtgatgaattcttgggtatacaagatacattaaaagcactggcagatccaatacgacgtgagattttaaatttattgaagaatggacggctttctgctggagagatatgtgaacatttttcagtaacgggagcttctatatccagacatctggcaatattgaaggaggctgatttaatccgaaataaaagagagggaaaatttatttattatgaattaaacacttccgtattggaagatgtcatgttgtggattatagatttgaaaggagtatcggacgatgaaggaaatgataaaaaaatatagaggttcattaatttgttctgttctggtaatgctcatcggggttttagtaggattcactagtacacagagcatgtgggcaaatgtgttttttgtagtgacggattgtgcgctggtggcaataatattttatgataaccggaacagacagcagagccgcaagattataggaatgacgatgtggattataccaattataacattactctataatggtattacaagactggtcaatatgggtgcagatatggaaaatctgtttatggcagtaatttactatggaactggactgctgtttatggttattggaaattatttgccaaaagtgaaacagaataataccataggaataagagttgtatggtctttaatggatgaagaaaactggaatgcaacacatagattcagcggcaaattatggatggcatcaggtattttatgtatgctttgtggactttttggggaaagcatggctgcactggttgtgtatattataagcattatggcagctgcaatcattagcattctctactcctaccttttttataagaaaaagctggcaaccggagaaggcttaaaaattcagtataatacaaaaaaaagtgtgatatatctgatcatcgcaatttcaactattgtgtttactatatggactttgttttgtggaagcattcagattcgttgtaatgatcgtgattttaacattgaagcaaaaggatggaatgattatacagtggagtattcgcaaattgacagcatttcttatgaagaaaatgtattgcagaacgataatggttacagaactaatggtcttggaaacctgaagtatgctatgggaaacttcaaaaacgatatcttcggagattatatccgctacactcatgcctcctgccattcatatgttgtcatgaacatagatggaaaaatattagttgtaaatggggaaaatgacgcagagacaaaggaaatctatcagagaataagtgagaaggtgtcaaaggaaagaaaatagttgtcggaaacgctgagaagaaattattctcagcgtttcttatctccttatcgttcaatcaattatttgctacaaaaatcagaagcatttcaatcagttcaccatgtcacttttattttgtgttatactgttttatataatttttttggtctccgctgccgcttcggtcggcacagagcagaggtccaccggacctcttgtgcccttgtatttgcccttatcagagttcgtaaacactggtgggacgatataacacaagggaaacaataagggaaagctcacctgcgaccaatccagtgttttcaatggtttgcggagaatttaataacaaaatataacagttattaaatttcttaaaacaggtgaaatctcaatcggaattcatagagttcttttgtgatttgcaactgctggttgacagatttacagcttgaaatggtggaatgcaaacagcaaaactgttatattgagctcataaaatctgcaaaaggagaaaaaaatggttttagctgataagattacagaggaaagaaaaaagaatggatggtcacaggaagaactagccaatcagttgggcgtatccagacaggcagtatctaagtgggaaagtgcaggagctgttccagatttgcaaagaattttacagatgtcggagctattttgtgttagtacagattacctattaaaagataaaatgaaagcagaaaatatcacttatcacgaaagtactgaaagctatgcagaaccgttgaaaaaagtaactatggagaatgcaaatgaatttcttgacatgaaaagaaatggatccaaagtagtggcaaacgcaacaagtatgtgtatctcaagtccaatattattgattgttcttgtgacaatggcagaagatggcgtatttcatgtttcggaatctctggcaacagtatttggatgtgtttttttgcttggaatggttgcggcagccgtctttttgtttattatatatggaatgcgagaatcacatatggaacattttaaaaaagaatgctttgaaacagagtatggtgtatctggaatagtacgagaaaaaaaagattcctatgaaccgatttttatcagaggaacagctgttggggtagtgctttgtatactggcagtgattccgacaattattgccggatccatggaagcgtctgactattactgtggcctttccgttggattgctgctattcatacttgcaataggagtgaatctgttggttcgtgttgggatggtaaaaagcagttacgatacccttcttcaggaaggcgaatatacaaaagaagaaaaactgtttaagaaaaagactgacacgttttctggtgtatattggtgcttgactacagcgatttaccttgcatggagcttctggacgatgagctgggatattacatggattgtatggccggttgctggtgttttgtttgcagcattgcttggtgtggtgaaaatggtgttaaagaatggcagtgaaactcagcactatatttaagatggagttaagtttttttcgcatattatacgcatccagaaattccagttgatatttcacttattttaggaaatttaataactgttatatttgattatcaaattcctcacaaacccttgaaaatactaagtttgtagcaagtgaactttcccttactctttcccttgtattatattctctcattggttttcatgaaccttaatatgggaaaaattaagggaaagaaaaattcgtacatagtataacatataacaataacgacatggtgaactgaatgaaatgttttcgatatttaactctgtaaatgattattaaaaaatggagataagatacaatgagaacaatttatgcagaatacaacataaaccacgatagtattgatgtttacacaagtgccggatatatgcttcgcattaattgttgggaagctgaaaaaaatttgaaaaccacatatggatcagaatgtgcgcttacttcattggctgtggatgagcctttggaatatgcaagattatatcttgatggcaatttacagatgtgggtggatgcagaagattcacttgaattataggcaatttaaacaaaagtttatatctgattttcgattatccatatgaacactttactttcaagcattttgagaaatatagaaaaacgctaattttaccactaataaatgagccttgatatgacactaaaaacaatatgggagatagcacaatatctgtgtatctcccgtttttcatttttgtaatataattacttcactctaatttttatattttcttatttttcaataatcataggacttatttctaaatctgccatagactgctttgtttggtatggctttcgggatatgattacacacatcatagtgtggatagtaatagagcataaaacatgtagagtaaggttgctacaactcatattgccatatataataactaatgacatcgaaaattaaagaaattgattagaaatagatttttgtttgataatcttaaatcagatattcacaatggaggcatatttatggcgcagagtattttaattgtagacgatgaaaaagaaattgtatcaatgctgtattgctatttcagcaaacttggatatacggtatatactgcaacagcaggaaatgctgcattaaaagaagtagaaaaaaaacctgacattattttgttagatgtcaatatgccagatatagatggatttactgtttgcgaaaggatacgggattatgtttcatgccctataatttttttaacagcacgcattgaagatagtgataaaataaaaggattttctattggcgcagacgactatgtaataaaaccattttctgttgatgaattagaagctcgcattgcagcacatcttcgcagagaaaaaagacacaatatatcttcaaaggtgcaatttgatgaagatatggttatagattattcctcacgtattgtgttttatcataataaggatatggcttttaccaaaaaggaatttgatataatatctttcctttcgcaaaacaaaggaattgtttttgaccgggaaactatttatgaaaaagtttggggattagacggcattggtgataatacagttgttacagaacatatcagacgtattagggcaaaatttttatctttaggcgatagaccttacattgaaactgtttgggggtgcggatatagatggaaaaattaaagagaagcagattgttcaatcggttaaatagcatgagtattagaatgacctttgttctttatgctttgttttcgttgttgattggaataattatttgtatacttttaatttcaatggttgacagatacagaataaatttaaactataagtatgaaaatctgtcaacgaggtatgatataccggaaaatggctcatttaccgccacttatagtaatgaccaaacaaaatacacaatatttgacacgaaaggaaacgagatatgcaagttcaatgttgattatcaaaaagaacgcccagtacacgaatatgtctatccgaaccatgtttcatatatcgaagttttacctaattttacaaaccgggataggcttattgacagtgctttaggttcattaaatattgcaattattcctatcgtattatctattagtatgatatgttgtgtaacatttttttataaaaaaaaattatcgaaacctattaagctattaactaatgcgtatcataaaattgaagcaaatgacttagattttacgttatcatatccattaaatgatgaaatggggaaactttgtcatgcctttgaaaaaatgaaagactgtttgtcgaaaaataatgaaactatgtttcgacaatttgctgaacagcgccgtctaaatgctgctttttcgcatgacttacgcactcctttgactttactaaagggtcatgctactatgctgctttcctttattcccaaaggcttagtatcacaacaagaaatattagatgaaatatcagtaatgtcaaaaaatatttcacgtcttgaaaaatatgtaaatgctatgacgaacttatacaggttagaggatattgatattccacgacaacagattacatttcattcacttattgataattttaataacacagcagaagcactttgttatgacaaacatttttcaattactacaagcggtaataatataaccttgtttatcaatttagatacagtcatgcagatttatgaaaacttactctctaatagtattagatacgcaaaaagtgatattgctattagcgtagtaatagagaatgataatttagttatatctgtttcagacgatggttgcgggtttaaaaatattgatattgaaaaggcgacattaccattttataaatcatcgaaagatatagctactgaacatttggggttagggctgaatattagtaagattttaagtgaaagacatggcggaaatatccaaattgctaataataaagcagggggagcatgtgttacagtgaaaataaattgcaatgaaagttgattgaaaatagacattttattgctattataaatttaaaagaaaggagataaggacaaatgaaaaaaataatatgtatgtttctaaccttattgttattggtgtgtattgttgggtgtagtcaagcaaaggacagtgataatcatgtagtacaagattattccgaagaatatgaggtttctccttatggaagtgaagaagcgcttgacactttgggcgatttgaagatttcaatgagtacagaaaaggatttagacttaaagcacctttcatttctaatagaaaatacttctgataaagaataccaatattcaccagattattttgaaatagaagctgaacaatccggcacttggtatcaacttaaacagcttgatgacccctcaaagagcaatgaaaaggattgctttattaagcctaacgaacgattaacattagaaattgatgttaaaagtttttatggagaattgcctgctggacactatcgtttgattaaacaatttgcgttctttgaaagtgaaagagattgggattacgatacatataatttatcttgcgaatttacgataaggtaaaaattctctacttcataagcatgaaaaaaaaccgcttatgaagtagaaagttctcatgccattttaacggcggttttgaaataacaatcaaaaccgccgttttcttttgtaaaaatgagaatacggagggtgtgttaaagtcgccctttttcaaggatacggtggtatcaaggaggtattgccatgtccttttttatgtaccatgtggagcatatttatgtctaggaagaaatacagtaaagcattcaaactaaggcttttaaaaaagcataatgaaacaggcatatcctactagaaattggaaaaggataatataatagcaggggacgatgtgtgtttttatcccctgcttttatacgttttttatcatattttgatcaatatagcttggtatttaactgatttttcaaataacatctaagtccaacatatactccttgcgaaagtacaaaaagcaatagaagatttactgacagtgtttttttgatggattctccaaaataaatgatgacagcagcacttgtcagtatcatcagtagagtaataaaatcccaacagtttttcttatataattctataacctttatttctatcagtatcaccagtatccctgttcctgctacgcatattccgacaaccaatatcagcaataaccaatatatgatttcggctataaacgcatttggaattttggtactaatctgtgccgcagaatgtccggcagcaatcgtccatccgataaaagtttgtatgaatgacgctgcatcatggaagaatgatttacaatcggaaaggaacacatctgactgtactgcctgaaaaagagtggttgtcagcgaataccatgcaagaaggaacaaggttgtttggaatattaccgtttttgctttatactgtcctgcaagtcgctctttttgtgtttcgtatttcgctttttcattctgataggctgtccggtcacaggcttcacatttttcatagagtaccggcttttctaccggtatctctacgattttctgatgtgtccgggcataatcccgttgttgtgttaagcatcgtattttatcttgacattcccctatcgtgacgtttgcgcttcgcagcttctctttctcgatctgcaatgctctgtctgccagcttcaagtcgttctttaatgcttgaatattcccggctctgttctctttgtttaatttctcgttcaaggtcagagattcgctgagctgcgtcttcagttccacgataagctggtctttctgttccagttcttcttgtatctcctcggtcaagagcagaagttcttccaactgttcggcgttctttgattctctggattcgttcatctatatcacgtcctttccttatttgctgttccagttcagcaattcggtgttctgtttcagcaataaactgttttcgctgttcagattctgtgccaatttctgccattgctgattttcgttttccaaaagttctatcttcgttttctgttcttccatcttggaaagcagttcctcggtatttggcaaaatgttgagcagctcggataactcgctgtttaatttttgcaatttctgattctgttcctgcataagagagagttgggtgtcccggttctgcatttccagaatcatttctgtcattaaggtctgctgttcttcgatttgcccaatcatggactccattaagggtataatttcccggctttcttctaatgtcatttaatcgctccttccataatgataatgcacccgatacttttccaaaggtgtccagtatcttttgcaataacgtgttttgttgttttatgatttgattttccgctactttccacgaaccttttatttcctgcccggcaagaaacttttgttcaatctttcttgcgtcagcaccttcatggatggtaggaatctggagttttccctgtttttcataagaacggtgatcgacctgattatgcaaagaaagatgttcattacacacctttgcccactcgctccgccatagttcacaattttttggattgttccatccagtagcatcggtcagcacccgtttccattgcaggcggtttcttgcaccaatcttctgaattccgttttcgtctaatacagggatacggattccatgacggtcagggtttttcttatcctgccaccagttcggatgggattcatcaatcacgatatttccgtttttatctctgacaaaatcccaatccttgacttctttctttccccaagaatgatccgggttaaaaggacgcatagtcagaagcagatggacatgggggttgccatcccctttatcgtggatactccaatcagcgcacattcctctatctacaaaagttttttggatatagtcggctgtatattgaatctgttcctgtctgctccattctttggggagggcaaattcaaatgacctgccaagttgggcatctgcacttttttcaatcttcaatacctcattccataaccgttgtttctgaaatgtgattttaaatttttctaaagcagcttctttatcttctgaccttttgtatcggacagatttttgaaagcgttttatattttcttctggtactatctgccattcaggaggtgcgttttcgcacatcatcagactggtgtagaccacttcttttttagaagtgtaataactgattcgcccggtttcctcgtttttcatcacatccccattgagatatgcggaagcggagataacagatttccctttacttcgtccgactattttgattgtgtaatgaaaaatcgccatgtctggattcctcctttctgacgtatccggcatagatttccggcaacattgctttcagttttagaaaaagcagcattgccggaacgccctctgcgtaagagtgccctgcgcatagcagcctgcatggaatgcgcctctctggcgaagagtgcctcctgcggcatgagcaggtctggctgaaagccccgccgacggaacgagcccggcaagcgtgagcgcagaccggttgccacttgtggcaaacttattgggacgacctctggttgtccataaatgcgcccttcatgaaaaagcaatgaagggaatgaaaaactcatcccccccccgccattacacttcctccatatcggtatgtgtttctttctgcattgcctttgaaaaaaatttcccattggcttcctgctttttcagaaaaccaatcagctttgggatgtcctcttcctcgataggcgcaccgagaacggattccaccgcaccgccaacctgacagagcctatgggttcgttttttactttcttcggctttctttcgtttcagaagttctttcttctgtgctgcatatcgttttgctttttcaaggctttcctgttccttcttttccatttcaagcattcgttcttcataactttttgttgattttgccatgattacattcccctttcttttacaaacataagttctcggttgcgtatcagaagaagcacatggtataatcttcttgcgtgtaggtatatcatggcttcggtctgatagaacctttggcggtttctttggaagccgcctttttaatttgccgcagttcttgttacggcttttacatttcctctatccctcaaatcacgaccttcattcgcttccataaacatttccagaatatcggttttaatcaggactttgcgaccaacctttaatactggaagtttcttccattctacaagctgtcttaaggtgtttctgccgattcccgtatagtcagcagcttcttcgatggataatgcaatttttctttgcgtcatataatcacctccttataaattgcattatgcaattcttgtgatgtaagtatatccttttcatatctttttgtcaagcgttacgaaatattaaaaataatttttaagttgcatattgcaattttgaaaaaacaatgctataattcatacataccgaaaaaggaggcagtcagcatgaaagataaagaattacgcaagctgatagggagcagaataaaacagcgccgtctggaattgaatctgacacagccttatgtcgcagaaaagatgggggttaccgcttctacaatcctgcgttatgagaatggttcgattgacaatacgaaaaaaatggtgctggaaggtctttcggaagcacttcatgtatctgtggaatggctcaaaggggaaacagatgaatatgaaaccgacattacggataagagagagttacagattcgtgatgcgatgggagatattctggaacagttaccgcttgcccttaccaaagaagaagatgctttttcaaaagatttattactgctgatgttaaaacaatatggtctgtttttggattcctttcagttcgcctgcaaaaacttcaaggggaatgatggtcagacggatattgccaaaacaatagggtttgaatcgaatgatgaatataatgagattatgttcttaagggaaatcactcctaccatcaatgcttttaatgagatggcagacgttgtaaggctctattccaagaaaccaaaaacagcagaacaaaggcttgcaaatcttttatcagaagtcttatacgaagattccgaatcggtatagtaagacaaccggagttatgatatacttacacgcacgaagcatttcatcagttccgattgtctaatatcgaaaggagacatacgattatggcaaaaggatctgtaagaaaaaaaggaaagaaatggtactaccgcttctatgtagaggacgcaagcggcaatcttgttcagaaagaatgcgttggaacagaaagcaaaagtgaaactgaaaaactgctccgtcaggcaatggatgattatgagaaaaagaaatttgttgccaaagcggataatctcacagtcggacagcttttggatgtgtgggcagaggaggaattaaaaacaggtacgctcagcaatggtacggtggagaattacctcggaacaatccgaaatattaagaaacacccattggcagaacgtaaactgaaaaatgtaacctctgaacatttgcaatctttcttcgatttgctttccttcgggggagttcatcccgatggaaaagagagaaagggttacagcaaagattacatccattctttttccgcagtcatgcagcagtctttccgctttgcagtatttccaaaacagtatattacgttcaatcccatgcagtatattaaactgcggtatcagacggacgaagttgatttgttttcggatgaggacatggacggaaatatccaaccaatttcacgagaagattatgaaagactgcttgcgtatcttcaaaaaaagaacccagccgcaatacttccaatccagatagcctattatgccgggcttcgtattggagaagcctgtggtttggcatggcaggacgtaaatctggaagaacaatgccttaccataagacgtagcatccgatatgatggctcaaagcgcaaatatatcatcggaccaaccaagcggaaaaaagtaagggttgttgattttggagatacgctggtagagattttccgcaatgcccggaaagagcagttaaaaaatcgaatgcagtacggagaactttatcacacgaactactacaaagaggtcaaagagaaaaacagagtgtactacgaatattactgcttagacagaacagaggaagtcccggcagattataaagaaatttctttcgtctgcttaagaccggatggttgtctggaacttccgactactttggggacggtatgcagaaaggtggcaaaaacattagagggatttgaaggctttcatttccaccagttacgtcacacctatacaagcaaccttttggcaaatggagctgctccaaaagatgtgcaggaattattaggacactcagatgtaagtaccacaatgaatgtctatgctcactccacaagagatgcgaaacgaaaatcggttcggcttcttgataaagtggtaggcaatgattaaaaaaaattcccttatttcccttgtgattatctcataagggcaaaaataagggaaactacatatcatttcactaatggacaggcaggaaagcctataaaatggggaaagttagaggaataattatataaattccagttgaccgagttctttagaacgaaggattggtggattagaaagtgtcttttacaggaaggtgattagatgaatgatcaattcttacaaggggtaatattcgattggaatagaattgataacgatagttatttaaagagaatcgaggcttttaaggggattgaaaaacttgattttaacaaaccaattactttttttgtaggggaaaatggcagcggtaaatcaactttattggaagcacttgccgtagcacatggttttaatcctgagggtggaacgaagaattatgttttttctacgcatgatacacattcagagttgtgtgatgcgataagaattgtcaaaggttatcggaaggaaaagtggggatattttcttagggcagaaagcttttataatgttgcaacgcaggaagaagaatatgcagatattacacatccttccgctaaatatcatgaaaaatcacatggagagagttttcttgcattagcacagaataatatgaatccaaatggattgtatctttttgacgagccggaagctgcattatcgccgcagagacagcttacattgttgatgcaaatatacagatgtgcaaaagagggagcacagtttattatagttacgcattcgccaattttgttaggaataccagatgcagatatctattgttttgataatggacgcatacatctgtgcgaatatgaggatacagagagttaccaggtaacagaaatgtttataaataataggcagatgctgttggatagattattaacagattagataataaagaaatcgataaattcacgtttttcaatttgccctttgagagaggagaaatccttttctcaaagggctttttctatttcgtgtgtccagcgaagctggaccacacttgccggtgaaagtccggtcacggtaatcgccagtgagccgtgtagctaaactcggtgcgttgtagtaatacagggtgctaagcgagtggataaagtaacctcgacaagaggagcgagcaatcatgcaggccgtaacattaagtgaattctgccgtatcgctaaaaaggtctctgataggagagcaaagagaagttgagccctgggtatatgggcgaaaaccatggaacgtgtgaagaaactggaaagcagcacggaagaatctctcggtatagaggaagcggtatgtatgaaaagtgtggttcggaactggagagaccctacccatcaccaaaaggtaaaaagaaagcgtataagcttggcgaaatcgtatttctgatgggagggagtcggagaggaacatagtaccgataatgactgtgcaagaaaacgcagtttatgggaaggttccttacttcattcaagtttgtagagagggtaagagtgagagaatgtcatgcagactaataactccaaagaaaaagttcgacaacttcaaaacaaactatatctgacagccaagaaatgtgacagccgaagatttcatgcactgtacgataaggtgtatcgggatgatgtacttttcgaggcatggaaacgggtaaaagctaacaaaggttccagtggtgtagagggaatcagaatcgaagatattgaagctgataagacaatggttagtatcaggagtattatacggaaatgtactgacaatctctgaaccgggaacaagccaaggttcagttatatctccgttattggcaaacatctacttaaatacactggacagactgtgggaaaagtatggacttactcacggtattcttgtaaggtacgcagatgatacagtaatcatctgcaagaataagaaaagtgcaaatcacgcactgaacttattgcagtacatcatgacaaaactggatttaaagctacacccagtaaaaacaaagattgtcagcatgtggaacggaaaagaggaatttgactttcttggaatgcaccacagaagaatgacaacggaaacaagcaaaggacaattgtataaagaaacttatcagtatccgagcaggaaagctatgaggaaaatgaaagtagaaattaaaagaaatgtaaacagtcgaagtctgctgattgcaaaggaagaggatttaataaagaatctaaatccgaaaatcacaggttggaagaattattattccaccaaaacaaatgaaaaatggatgcaggcattggactggtacattatctgtacctttacaagatggtataacaagaaacaccaaaggcgtaaacatatgtcaagaatgggatttgttagaaatagcatttacgaaaaaggattaaagaaaatggctagagcatgacgtaatgctgtagaaagaagaatgttggaaagccgtgtgagggagaacctcatgcaggtttgatgaggggcggatgaaatttctcatccgcctactctaccctcgaaaattgagaattacatatgttcaattctttgtattaggtatatattttgaaaagttatccggttatactgacaatatcaaaaggcagaactgttagaatgaggtgagcagatggatacagcacagcgaataaggttaattcggatgattgaaaaaatagagaagaacccagaattcagtagtaaaatcggtgtgagaaatacatctgagtttatatcaagtaaacaatcaaaaaaatgaatgattcaaatcataacaggagtcagaaggagtagaatatgttatcgttactatttgctatatgcataatctggtttattggaaaattttttatatttggtgtaaaagcatcctggggaatcttaaagctgctctgtacagttgtatttttcccggtgattttgataggaatggttgttggtggactgatttatattgcatttccgctattgatcgtaggtggaatcattgcacttataacatctaattcataaaaattcggaggggatattatgggatatgatatagaaaaagaaaaacgagaagcgattgaagcaggacaacgagcgttaagtagtcttcggatagcaaaagaaaacctgaacagtgcaaaaaattggggcttggtggatatgtttggcggtggattcttttctacgatgttgaaacactccaagatggatcaggccagacaaaatatggaacaggcgaaatatgatcttcgtaattttagtagggaattaaatgatgtgaacatggcttgtaatttgaacatcaatactggagacttcttatcctttgcagattacttctttgatggatttgttgtggattggatggtgcaggatcgaatcaataatgccagacatcaggtggaagaagctatccgcagaacggaatacatcataaaccagttacagcatatgtaaaggaaagaggcagtggaccataaataggttcgctgccttgttttttcatacttatttttgtttctttttttcttctctgagcaattcgatgtttagtccctgctctccggctgttttatcaacccagagattcagagaatctattgccagagaaatctcatccagtttgttactgataaaagcaaaatccttgatctcatcatcgctgatcttaccgtcacgggcaatctggatcagacgtgtggtaagaggattaatctcattcagactggcaatggtttccaggattatattggataagtcagaaacttcgacttccgggacataacgatgaccgatttcgcatttatgagagcagtaataattgcagagatctggtcgcccgtaagcgtctgccatctggataatatcgtaaggtgtaggttcctgcatttcatattcaaatttttcaattttagaatcagaaacagcagtcattttttcgctggcttctgatctggtaagaccggcttcttcccgacaaatctgataaattgtcttattttctcttgtagattgtttccccatgagaataacctccccgtatatcgccgaacatgaggattatcaggtgttaagtccacatgctgtgcgtgtatttcctctatgaattttattatacttgaagcatcagtaaacaacaagagatattagacctcgcaaaatgtggaatctattatgaaatgaaagaggaggagaatttgattatggcagtagtaacagaagcatttgatattccaatggatatcatgacaaaattggcaactggagaatatcgcagactcggtggagttgttcgagttgcaattggtccaaataaagggcagattgtaaagcacttggatccaataaaaattgaacaagtagcacaaaacaaaaatgttgtaactaaggtgattgaattttcaaagaaaaataggaaagtgattattatcggaacagctgttgcagggacaatggtagcaggaaattttgttcatcaaaaaattaaaaacagagaaccgaaggtaatgaagagatatcatgcagctttgagatcctatattgaagatattcgaaatggtgaactaagtatgaaatctatcaatcgcctaatggatgctttagaagagctgaaacaagataaaagatatgaaatgttgaagattgaattgactaccgaagaattggatgtactggtaaatcgtatttatgaatacactgttaaattagccagtgataatgcagtagaattaactgatgatgagaaaaaatcttctgacaattcaattctgaatttacagagatatttaaagacgcaaaaacgtatatttaaaagtgttgcataaacccaaagatagcaggggtttttataccccatctattgatatacactgtaaccatcaaagaagattaaatcataaaattcaaagaaatggaggagttggcaatgaaaggttttaacactgttgatggttacatgggattggtagatggtaaatatatcttgtttgctagtgaatccgattactatgaatacatgaacgattaaaggaggagctgctatgaaacccatccatgtaaaactcttttcgcaggatgcttcgaccggattcatctacaatctttttcccggttttttcattgtgttcaaacagaagataattgatagcagctgagtaatttgcatttctgcttttaatgtgttttacgattgccattcataccacctgccagtttcagtacttcttttctcaataggaataagtccgtgatgcactgatggatttcattttctatagcacgtgactgactgccaccgctgttaaaatgcttggcgatctgattgagattcgatccgatttttccatattcactgaccagttttctgaggtcgttcatgtctgcaacaacttcaatctggtgattgatttgcttctcaagcagaagttttctcagatattcggaatgagaaagtcctgtaacgtcagcagcttcatttaatactgccaactcaatatccgttagttttaatgtgatgatattacttctcttgagattcttttctttcttctttggtgccatagtcctccttcctttttgataagacatcctggatatgcgattacactttttaaccggctgtcccttccagttatagttatataaagtgctgccactatctttgatagagagcctacagatatctttgatgtctgtacgagggtatggggaatcggaatccccatcaagagacttacccggaggtatgccgtagccataaaatggcgatacggtaatacctgggtggatcttgctctaatctacgaaccctcttacatatacaaaagatggagggggaaaatacagggtgtgagagaaaagaattttagaaaaatcaaaataactcaaaaacttgacttttaacattgtcaaagttaaaatgaaagaaaatgagttaaaaggagaacgagaaatatgtttacaagcgtattcgggatttctataaaatatgaagcatggaatcatcaggattctttgcctgtttatattgcagggagttatgattttcatacagcatatattggaaacagacgctgtataatgcttgctccaacagaagaacttgccacacttccggcattgaaaaaacaaattgtaaaaatacagcagattgataatgtgccagttgtatttgaacttacaacggtatcaaattatcgaagaaaaagccttatagaaaataatataccgtttattactgataagcaagtctttcttcctttcattgggacaatgctttctgatgaaaaagaaccccaaaagctgacgggtaagtttgtttactccacgcagcagttgtttttattttatctgtacagtaagaaaaaacgattgtatatttcagaagccggaaaagtgcttccatttacagcaatgaccctgaccagagcagtaaaacagttggaagcgacggatttatttcttgtagcaaaagacggtgtcaataagtttattgagtcaaaatataagcgagatgaattatttaaaaaagcaaaagtatatttgacgactcctgttcgaaaaacaggatatatagataagacgcaagttacagaaaatatggtctttgcaggggaaacggcactttctgaaaaaacaatgctaaatccaagtcgagttgttacctatgcaattagtgagaaagattatgataaaaccttgctgactgatgaattgatagacccggataaacagataagacttgaattatgggcatacaacccgaaacaattttcagaggataacagtgctgatgatatttccattgttttgtcttttgcagatacaaacgatgagagaattgaagaggcagtagatgaattacaggaaagaaggttgaaggagtaatggtcagcggatttacaaaatttaaggaaagatttcagggctttgaaaatcaatatgtcatcatcggtgggacagcgtgtgatttgattatggaaaacgaagaattaccgtttcgtgctacaaaagatgtagatattgtactgattgttgaatccataacagcggagtttggcaggcagttttgggagtatgtcaaagaagcaggatatgagcatttgaataaaagtaccggaaatgcacagttttatcgtttcacatctccgaaaagcaaagaatatccatatatgatagaaatattttccaaaaatccagattttattatattggaagatgatgcagttctcacaccgcttccgatagacgatgaaatctccagcttgtcggcaatccttctaaatgaagcgtattatgaattgctaaaaactggacaaatgatggttgaaggcattccggtattaagtccgacttgcctgataccatttaaggcgaaagcgtggctggatttaaaagaacgcaagttgaatggagagcaggttgacagcaaaaatataaagaaacataaaaacgatgtgttccgattagcacagttaatcacagtcaatacaaggcaagttctcagttcggaaatagcagaggatatgaaaaagttcttatctgaaatagctgatgaaacagtggatttaaaatcattaggcattagagggacggataaacaaaaaattatagatatgttgtacctgtgctacaatttgaacgataatacataatttttctctaaagtcaaaaaaattgcatatcagagactgtgatttcaggatgtaaagaatacattttgaaatcacagcctttttctttacagaaaaatagttttgtaatcgtatgcgccaaatagcagaaagctaagacggaatcaacacacatgcacaatatcccggagctggttgaaaacagtagatggtcagagtcttgtcgatttccggactataatcatgcaggatatgtttattgccgtttaacgctacatctgcataagtgacaagccattttttatccccgttttcaaagacttcataaaatgaacgattcaacatttctgaaacgggaacgccctcaacaacagtcatttcatcattacagtaacggaatacaaagtctacaccatgtccctccgcatcaaatacaagttcaataatacaaaaagcaagtggcatatcattgagaaagctacagttatcaaataattgaagagagctgtcttctgaaacctccgaaaggttctgcgtatttaaaccaagttccttacggatctgtttgtgctgactcagattacgttttctcccttgaaagacagcaccatccgtcattgtataaagtccttcgtcagatatatgaacaatttgattttttcgaagaacaatgccctttgagatatttagaaaatcttcttccggcaagtaaagcataagttcttttatcgggattgtagtcgtaatgctttctcccgaggaaagcgtaatgattgtgtgaggattctgtctggtaaggtaaaaaatatctgaacttttgatattctttcgttcgaaatatagtggaacattataacgcatatgagaccttcctttattgtgataattttatattactatagttgttttgaaaatacaatagaaataattaaaatgcaataatcaatgaaaataaaatgcactttaattgagcttcacaacaatttatctaagaaacattaaataaaagcgcagatttgagcaaaaaagattgctgattaaccgtgtgagtggtattataaaaaagtataaataatgatacaaaacgaatcatcaggcagagaaatgaagttaagatcgttgatcaacatcttaaagagtatgatgcagaaatagagaatacacttcagaaaatacagtacacagaagcgaaaaatgagctgaatcagcaatggtctaaagatatagatgtatatgaaactgccggaaatgtaggaaatacattgagcgcctatgaagattatatgaaagccgcgcaactgtatatggatggtaagacggatataaatgctgtcgaaaagagtaagcaaaagctttatgacaattttattgaggtttataaagcggctggaaatagctttgaaaatccaaccgatgagaaaaaaaggacgctatattttgtaatgacacgatagatggtgtattcaaaagatcgatttggagtatgatcaatgcgttgaataagccgagtgatgagaaaaattatgcggatgctgcggcacaatttgcatatagggcttatggattttctggtgatcaatataattacatagtttcaagtattgataaacaatttatggaaatcattaagatggagatgatgtatcaggaatttattgcacagcgtggtgattattttgaagagaaatatccagatgatgaaagtaaatgggagagctatgctgcatggacgaatgatttaaataagttgaatgaagatgttgccaaagctatggatactatgcttgacagagaaatattagtttcggattcaacggttggttcgattcggatgaaattggatgaatttgtaaagccagaagacatggtatctgtacgtatgaaaaatgaaaattaccatgagaaattaacaggcgagttctatgagaatgagcaaccgattatcgatgcgtttaacgaaggttatctttaccttattgaggagtatggttggaaatccaatgctgatgtaattacgccgtttattaattttcacagaattgctgtgccgacacctaaaacggaggagaatccatcgggaatagatatttattatattttcgatacatcacagccacacgatgcggaagaggattgggcttggaattcagacgattctgttcctgaaaatttgcggttttatcaatttgaagagaaaatagatcttactttggcgagagatcaacatattccatcttgtgattttattaatttaacaaaagaaaattatagcgatgggcagaatcaatttagttgcgcgaaaaatacggcggaatttcagagcttattcgctacaggactattcagtgcattatcaagtatacctggtgattatctgagtgaatacctgcttacaaaaaaagatacaaaaacatatattgctttatcggattatgattttgattatcatgatgcatgggcgacaagctatacgattttccatgtggttgatacaacaggacagtatccgggaagcagtcttgaaagttctactttaagtgcagaaaaaattcaaccggataaatcagcgggggcatattcggcatataccgttatattaaagaaccgcccacaagaagatggttattataagacgaaagttgatgttgctacgaatggagtcggagatacagagttagaaatgattcaggaagatgggacaacatgtcaggaaaatactgttccttcaggaaaagaggtaacacttcggtttaaggcggaaggtacaactgttctggaatccattacattacagagacataacaatacagaaaatccatcagaagtaacttcggaagaaacgttgttgacaaaagaccagatcgcgacattgagtccggatgaagaaggatattatacatatacatacagtgcaccatattcaaatgcaacatttgttttaaacggagcagtaggacataaggtatatgtgaaaggtacgaatcagtcatttgaagatgcaattcaattggattcctatgtagattactttgaagaaggagaaaatgttgaattttatgtatcagataatgtaaagagtgtcggatattatgagggaaatacttataaagagcttgcattaacagaaaattatgagggtgacagaaaaggaagtttcgtaatgccggcgaaggatattacattatattataatgcagtctgcaaggaacattcctatgacaatggattctgtacgaaatgtggtggatatcagccggcagactataatgaatctacaggcagttatgagattgggaatggtggacagatgttttggtttgccgctcttgtaaatggggacggtgaacatacacagattcaggaagcaaagccagatgcacatggagtgctggtgtctgacatttcacttaagaatccggcggatgaaaactatgaatggaaaccaatcggagaattcaaagggattttcgacggacagaatcatacgatttctgatttcagtatgacgaaagtaaatgatcagtcaataggctttttccagaaccttatgagtgacccgaacgagacagacgaggcaaagaaagcgacgcttaagaactttacactgaatggaacaatcgttacaacagcagaggcggcaagtgcagtaggtggtgttgtaggaacaacttccgacagtgtgatcaggcgggtgaattcaaatgtaaatattggaagtggattgatatactatatcggcggaattgtaggttttgtaactgatgatgatacatatgcaggcggcacaaaaatcaaggattgtgcaaattacggattgatcacatattataaagtggaaaatcacggaggacgtggttacagcggtggaatcaccggacaggttgcattgggtgaagaggatttcattctttctgattgttacaattatggcagtgtgcttgctgaagagtggaaggagatctatggtgcaatttccggatactgtgcggcgaagaaagatggaatcaagaataattattatctcgatacacttccggtaaaaggtttcctgggagaagctgagattgcgaatgatgaagaactggcaaaggcaaagacagcagaacagttcaagagtggtgaagaggcatatcttttaaataacgaggtgacagacggctctcaagtatggtatcagaatattgataacggagaaactccggatgcttatccggttctggatgatacacatggcacagtctatcgttgggaagatggaacctattcgaattatgagaaagaacctgtagaagaaacttacgagattcgtacatttgaagaatttaagaaaattccggaaattgttaagaagaacaatcgtgcaaacttcaagctgatgaacacaattttcggaaacggtaaaacaatgacagaatcaatcggttcagcagacaatccgtataatggtacatttgacggacaaggatattatgtctaccgattcgatatcaaatcatcagatggaaatgcagcactttttgatacgatcggtgcacggggaagtgtaaagaatttcgcagctttttatcaaaatattgaaggagagaaagcagcaggtctagcgattgtcaattatggattgattgatgagtgtatcagtggatcaaatctcagcggtccatttactgatcaactcacgcatgagcctaaaaatttgacggagacaacgacatttgttaagggcacatcaatggcaggaggcgttgtagttgagaataaaggtgtgattcgaaatactgcgaactatgcaaaggcaacagcaagtgcatcagatggaattgctggaggaattgcagtagtaaacagcggaacgattgagaactgtatgagtataggtgctctgtcaactaaggaaaatggaattgccggaggaatcgttggaaagctggataaaaatggctccattcaaattgcatatagtgcacaaactgcgatagaaggtgggacaaccggagcagtatttggcgcaaaagaagaaacagcaggagctgtaaataacacatattaccaggataccttatcaggaaacgaagaacagggaacagcgaaaacagcggctgagatgaagagcaatgcttttaaagaggaattaaatactctggtagcaggcaatgaagaattgtgtagttggacatggaattcaacaaagaatcaggggtatccaagaatcttatcttcgcttattacggaagttgaattagtgaacgcatcaagaggacttaccgtaaaaggtatgatgcataaagatacgaaacttcagttgaacgagcttgacaagaagaatgacatttatcaggcatttaagaaatatgcacagaagacagataagcaggttctttattcagcagaatcgacgttagtatatgaagatggacagccgtctgcatacgaaggaaatctgaatgtaaaactggatttgtcaaagtatcgaggaaaaggatataaggttcttgtttatcgaaataatcagatcgaagagcttgaaattgataaacagatgatcgcctcaaaagatgtggaagagatggttccgtttgctgtactggctgaaaagagtgagctctccaaagcagttgatcatattaaggatacagtaaaaacaggagataacagcagtgtgattcttttgcgttgtattgttgttgtggcaggtagtgtagcaggtggagttatttactggagaaaaaagaaagcaagaaaataagatgaaaaaaaagacaaagattataatcggaattctgattgcggctgtgatagcagccgcaggaattacctggtatgttatgaaccaaaagaatcagaaaaccggaaattcgtctgcagaagtagtagcctgggatgtggatatcgaggaggaagaaccttccgaggaaaaaggaatcctgattccgggatatacaagtatggtaatgaaggcaaatacaaaggagcagacagtaagcattggtaatccggcagataatgattgcatttttgtaattgtattgaaactggaagatggaacgatactgttcgaatcacaagagctgaaaccgggagaaggtctggagaatattacgcttgaccaggaactggaagccggagagtatcaggcagttatagaatataagtgttattcattagaagataaaagtccgttaaacggcggaagcgcagagtttaaattatatgtaaaagaataaaacgtggaggtagaatgatgaaaaacaaattagtagcaggatttatggcagcaacgatgatggtatctgttatgtcaacaggtgtttttgcaaaagagcttgatccggatagtgagactaacaaagcgggagatacgcaagtgactgcaacagtggaggaaaatgaaaataaagcagcttatgttatagaaattccggataaggttgattttggaaaaatacagcagcctgggacagaaggaaatgcatattcaaccaaagatatcacagtatcttgtatacaagcagataatctggcggcaggaagtggaatcgctgttttagtaaaagatgcgacagcaactcaaagtactgatccgttttgcctgacacataatacacattcagattgtgttctgaattatgagattatgaataacaacgatgagagtattcaaaatgggacatggtatgcaaatggatttttatttaatctatttacgggagcaggtcaagaagcaactgacaaattaagactgaaccgtaatcagttatataataaagatctttctgtctggggtggacagtacaccggtacacttaatttctatacaaagattgtagatgtacatgcaaattaaaaaagagtggagtaatacaagaaaaagcttgttaaaaatcttttttatgtcgctcgttcttgtatgtatttgtactttatcagttccaaggaaatctctggctcaggagacaacagattctgcaacttatgcgggaagtaccagcgtaaaagcataagtgacaggaaattccgaaaatgagcaggagaaccatcctgaagatgaggaacatttacaagacgaaagcacaacaaatgcgaaaacaggagacgagagcaatgcaagaatttggattgcgatattgatattctcaatgcttgtatttggttgtgaaataaaatataaaaaggtaacaagtaaataaaaaattgtgttatcatagaaaaaaagaaatgtaaaaatgaaaggggcagcaaaaatgaaggagaataaaacaattaaaattatcacattaatcacaggaatcctgacagtgctgttaggtttttatgcagtagttcgacctatgaggacttttttagcaatcggatggattcttggaatgcttctcttcgtgaatggtattgaacttgtgatactttcattgtcaaaagagaagaaagatatcggaggatgtattcttggagtcctggaaggacttggcggtatcattttattgttcagtggcgtacagagatttcttacagatatcatggcaacttatctggttggtgccagtgtcctgatttatggtatcttccagattgtagccggagtgaagaagtttaaagattctaagggaaaagcaattttagcaattgtttgtggtgtgttatctgttattgtaagtattatagcctttacacatccggtattgactatgttctcagttggatatatgatcgcatttgctgttttaatgcagggaatcaatatgatcgtacttgctgtgaattttggaaaagagagtgagtaaatcaaagaaaaatagtaaatgactaagagaagagaactccagtgaaatgagagttctcttcttttttgttatggaaacagaaatacaaatcacaggacaacaagtaaaactgagttaatctgtatgaaaaatatgcttgacgtaatatattgtctgaatttataataaaaaagtgtaaatcatacgaaaatatggttgagaggaaggaagaaacggcgatgaaaaaggaatatttggacaagattgcagaatatggacagttgattgttgtttcgggaccgtcgggtgtggggaataagacggttttgagagagtatttgcaggatcatgaacaggcgtgtgtcagtgtatctgtgacaacgagaagacagagaaagcatgaaatagacggaaaagactattggtttgtgtctgtaccggaatttgagcgaatggttcgtatgggtgagatgttggaatatacatacgtgaatggtaatgcttacggaacaacgaagaaaagtgtagaggaagcgcgtacaagagggaaaaatgtaattctggacgtggatacaatcggagcaatgaagattcgtgcactttgtccggatgctacactgatttacattttgccgccatcttgggatgaattaaagagccggctgtctagtactggaatttataccgaagaagaagtgaatgctttaatggaaatagcagaagaagagatttcatgtgccaatagttatgattatattttggtcaatgatacgatttcaaatactttgagtcgttttgcacagattattcatagtaatcgctatagccgtaactgtatgaaagaatttcttgatagttacatagacggagaagtgaagcctcatgttcagtcatacaaagaggcgttactgtaaattttttgattattggaaatattctttgaaagatggcacatattttgcgaaagaagattcggatgaaaaacagaggagagtcgtttcgtctaccttgcttttaaagaaaacttacagcgtatgctcacggacagtgagttcactgtaaaagaacgtatatatagggaaaataaaagctttacattataaaaagtattatgataaactgaatatcaaactgaaaatttgcggtgtaggagatttcttacaccgcatctgtgttttagaaagtagagggatgaatatgccaataggagttattatcaatgccctgtcggttgcagccggcggtgtgatcggggcattattcgggcacaagctgcctgcaaaaatcaattcggaacttaccaagatatttggtgtctgctcaatgggaatgggagttagttccattggacttatgaaaaatatgcctgctgttatttttgcagtgataattggaactgcctttggtctggcagtcaatctgggcggaattattaatggcggagcgacctgcatggagaaaccagtgggaaaactcttccccaataagaacaaatccatgtccagagaagagtatatgtcaatgcttgtgacgatcatcgtattgttttgtgccagtgggacagggatttatggttcactggattccggaatgagcggtgatcatacaattttgatttcgaagtcgattctggatttctttactgcgatgatttttggaggaacattaggtatggtggttgctgcagttgcaattccgcagtgtgtgatcttccttattatattcgcagcagcaaaatttatcttcccactgaccacgccggatatgattgccgacttcaaggcatgtggaggcttcctgcttcttgcaactggtttccggatcgcaaagattcacgattttccagtcgcagacatgatcccggccatggtgcttgtgatgccggtgagttggttctgggtaaatatgatcgtaccgatgctgtaaagtagaagaaatgtatcattctataattcagcatgttccaatacataattcttaaaattcgtaacaacaggtgcctgataaacattcttcaaagttgccatgtagaagagtctctcccaggacggagttgcaatctctatgattgaaaccggtaaagaggaaagaatcggcattcgcggcacaactgcgatgccgaatccggcactgactaatccggcaacaccctgatcttcttccattgagtaagcaatctgagggtatccgccacatttttcaaataacttgtcaattacatgtcttaaaccgcttcgcttagagaaaacgatgtgcggatacgtaagcgcttcttttagatcaatcgaagttttcctgtccaaaggatgtccttccggtacgatcagtacaagctcttgttttgcgacgggaacaaactcaacgagcggttcattgtccatcttggaacaaaatgcgatgtcgtattttcgctcttttaatccctggatcatgtcggatgtgagtccggttgaactatgaaaataaaaatcgatttttttgttaggcgtggaatccaaaaaaccttttacaaagttcggaacaactgcactgctgagcgtacggagttcaacaatatcgatgcggccttccccaaatccggtcatctgcagtttattgatgcttgaatccagcatatccaaagcctgttccacatcgacaagaaaagcctgtccacattttgtgaggacaacgttacgtccatctttttcaaagagttttactccgagctcactttccagagatgagattgcatgacttaagcttggttgagtgatagaaagaatctccgcagcctttgtgtagtgttctagatgagcgagagtaacaaaatatctaagatgatagagattcataaagtctagtaccttccttataaaaatttgtatcttcccatttaatcaggttcattttatatctatttggtaactgttcagagccaagcaaaatttcataaaacagatgtaaaatgcttgcatttttaagactgtttttgaaattttatttggcggatacgccacaccgacgaaatgcgtagcattttggaggttggctctgaacagttactctatttgagagataaatacgcaataatgcttattgataagaatatcgtaacatgaagtgtaaataaaatctataaacaaaatgcatggatcgtgatagaattaccaatttgtcatttatttaacaaacagatataataaaaatagaaaaaaacaacaagattgaacagaaaaatccaatggattatattcaatttttacaatggaggaagaattatgtcaaagaaaaacccaatcacagtaagttcatggacacttggagatcagtgcaaatttgaagatcgtgtaatcgctgcaaaggaagcaggatatgaaggaatcggtcttcgcgcagagacttatgttgatgcattgaatgaaggacttcatgatgaagacattcttgcaattcttgacaaacatgatatgaaagtaacagaggtagagtacattgttcagtggtgtgaggaacatcgttcttatgagcagaaatacaaagagcagatgtgttttcatatgtgcgaactctttggagtaggccacatcaactgtggactgatggaaaattattctgttgagtacacagcacagaaattaaaagaactttgccagagagcaggaaaatacatcattggtgttgagccgatgccatacagcggaattccggatcttaagaaaggctgggaagttgtaaaagcttctggatgcgacaatgcaatgctcattcttgatacatggcactgggtaagagcagatcagccatacgatatccttacaccggagattgccaagaaagttatttctatccagatcaatgatgcttatgaaagaccatatgcagcacctattttaagagatgagtctatgcatgatcgtcttgcaccgggaacaggagcaaaagatacagcaggatttgttaagatgattaaagacgcaggagttgatccgaaggttgttggtgtagaagttatttctgatgcaatccttggaaagggactgaaagaagcagctgcttatacatatgaaaacacagagaaagtattaaaagaagtttggccagagttggtagactaatttgaaaaacagatgatgccaaagagagaggtaaaatgatgaaattcaaaaatatgttttctccgattcagattggacctatgacagttaagaatcgttttgtggttccaccgatgggaaataatttcgcaaatttagacggaacatggagtgacgaatctgtggcttactatggtgagcgtgcaaaaggtcagtttggtctgatcacaattgaagcgactgtagtacataaaggggctaagggaggtcctaaaaaaccatgtctttatgatgacaacagcattgaaagcctgaagaaaattacagatgcctgccatgaagaaggtgcaaaggtatctatccagcttcagaatgcaggaccggaaggaaatgcaaagaatgcaggagcaccgatccaggctgctacagcaatcgcatcagcagatggaagagacattcctgaagaagtatctacagaaaaagtgtatgagcttgtaaaaggatatggtgaagcagcagaacgtgcaatgaaaggtggagcagatgcagtagagatccatatggcgcacggctatcttgtaaattcatttatgtcaccaagaacaaataagcgtgtcgatgaatttggcggaaactttgagaacagaatgagattttcacgtctcattattgaagaagtaaagaagaaaacagaaggaaagattgctgttcttgcacgtattaacagtacagaagacatgtttggaggacttgataatcacgatatgtgtgcagttgcttcttatttagaagattgcggaattgatggtcttcacgtatcccgtgcagtacatttaaaagatgagtatatgtgggctccgacaggaattcacggcggattctcagcagagcttgttgcaaatatcaagaaatgtgtttctattccggttattacagtcggaagatatacagaaccacagtttgcagaacagatcattaaaatgggaaatgcagatttagtagcatttggacgtcagtcacttgcagatccgcacacaccacagaaagcaatggaagaaagactggaagatcttacaccatgtatcgcctgtcttcagggctgtgttgccaatatgtatgcaggtaaaccaatctgttgtcttgtaaatccagtactcggacatgaaaaagaaggacttccgaaggctgaaaaggcgaaaaaagtttacgtgatcggtggtggtgtggcaggtatgtgtgctgcatttacagcgaagagacgcggacatgatgtaacattatttgaagctacagataagcttggcggtaatatgagactggctgcatatccaccaggaaaaggtgatatcacaggtatgatcagaagttacattgtaaaatgtgaaaaagccggagttaatatcaagatgaatacaaaagtaactgcacagatgttgaaagaagatacaccggatgcagtgatccttgcaacaggagctgagactttagtacttccatttatcaaaggtattgaaaatccggatatcgtctatggtgttgactgcctggaaggaacacgcccggtaggacataaagtcttagttgttggtggcggtatggtaggtgcagagacagcagacttcttagcagagcagggacatgaagtagccattatcgaaatgagagatgcgatcggaccggatgtgatccatgagcacagaatttttcttatggaagcatttgaaaaatatggcatcaaacagattacaagtgcagctgtatcagaaatcttctcagatggcgtaagttacaaaaatgcagcagataaatcagacgagacgatctacgaggcaagaggattcgacacagttgttctctctatgggattcagctcacgttatacacaccgtgatggacagaacgtagtttatgactttgcagaagaattaaaagacatcgtaccagaagtccacatggtaggtgacgcagtaagagcacgccgtgcactggatgccacaaaagaagcatatgaggttgcattgaatttataaatgaaattatatcaggaggattagaatcatggaaaaaagaatttctggacacacaggcttaatgggattatttggatcaccggttggacattcaggatcaccggcaatgtacaacttcagtttccagcatgacggattagattatgcatatctggcatttgatgtaacagaggaagaaatgccaaaagcatttgaggcaattcgtttattcaacatgcgcgctggtaactttacaatgccatgtaaaaatattgcagcaaagttagttgacaaactttctccggcagcagagatcatcggagcatgtaacgcatttgtaaatgataacggtgtgatcacaggatacattacagatggtgttggatttgttaaaaatcttgagatcaacggtgtatctgtaaaagataaaaagattgttgtccttggtgccggtggagccgctacagctattcaggttcagttagcattggacggagcaaaagaagttaacattttcaatataaaagataaattctacgaaagagcagaaggaacaaaggctaaattagcagagaagtgtccggactgtgttgttactgtagaggatcttgctgataaggctaaactggaagaagagatcaaaacttgtgatattcttatcaatacaacgattatgggaatgaaaccacacgaggatgtaactctggttgacaaatctttattccgtaaggatcttgttgttgcagatactgtatacaatccagagaagacaaagatgatccttgaagcagaagaagcaggatgcaaagcaatcggtggcgcaggaatgcttctgcagcagggggcagttaactacgaactgtttgttggaaaagagatgccacttgctgagtatcaggaatttcagaaggctcaggcaaaataattacattcacaaaaggagaatgatggaatgagagcaaagaaatatttgtggtctatcctttgtgtatatttttgctatttaacacatggtatccaggctatcattttaagtcagaacaacgtaaactttgcaaaacagtggggattcaatatgacagacccacagtcagcagcatatgcagcaggtcttgcagcggtaagtacagcagttgcatggacaggctttggtaaattcgtcagcgtctggatcggtggagagatttcggatcatgtaggacgtaaaaaattaatgatcggtggagcagcattatatattctatgcttccttggattcttatttacaaaaagtgcattagttgcttctgtatgtggatttgtttcaggagttgcaacatccggtttctgggatgcatcaggatatccggctgtacaggaagcttatccggtagcacctggatctgcactgatcggaatcaaattttttgtttctgtttccggtatgatttatccgttcctggttgttcataatgcaaacagcggaaactggaaattaaatgttattattccggttgtaatgtcagttgtttgtctggtacttgcaattattgcaccgtttgcttatgatgatcagaagaaagtgtcagaaggaaagaaagacaaatccgataatgcagtgcaggctgcaatgcttgtaaagccaaataaatttatcgtatttcttgtaatgttttatgcgttcctttgcatggcgatcatgtatggcgcacagcagtatacaaaagcatttggactttccgtatgtggactttccgagattcaggcagcaggtatgacttctatttatacaatcgggtctatctgtgcagtacttttctgggcgttcatgatggcaaaattaaaatggaacccgttaaaggttgtccttattgattctatctgtacagcagtggcacttgcgggtgtactgtttatccatcaggtagcaatcatttacatcgctatcgcaatgttgggattcttcgcagcaggaggtgctcttcagacaggtcttgcagttgttcagttatttaacccaggaccgaaggggagaaatactggtatttattacacatttatgggtgcggcaagctacctgatcccagtagtggcagcacagcttacaaaatcatctggtgaggcaagtgcagtatacagcctcatgatcatgctgttagtatttgcaatccttgctattttaagttctctctacttagtagcacagcacaaaaaaatcttcggaaaaagtgcattataggaagtaacatagtaacaatctcaatttatacgaaaaaatggactgttgttccaaaagatgttatcatcaaaaagaatgcagtcctttttttgagattaaattgttaaaaaatagacacttgtaaatcgaaaaatgaaggagaagcttaaaagatgagtccgaaaagaacaagaaaagccaacgaacttccctatattccactcggcccatttcagtggcgtattccgggaattcattataaattagaatatgtagaattttttcaaggtctgatccttggcgctactgcgttaagttcgattccgtatctgacggataatcttggacttccgtatgaacttgcatggagctgcgtcatcattgaagtatttatgtacatgcttcatggatggttaggagatccggttgtcccgggatggatcacaccgacattaccatttacactggcatatttaaatggattcccaaaaggaccggagcgtattcaggcaatgattgcattgcagctgcttgttgcatttgtatttatatttatgggaattaccaagcttgcagataaattcgtgaatggtgtgccgaattcaatcaaaggcggtattctgattgcagcaccgattacagtattgcaaggacagctctcagatggaagccagctgatgactgcgccaatcgcaacactttccggtacattgttacttgcgtttttgagtttttcaccgttctgtgaaaagaacagagaaaaatataaaatattggatatcatggcaaaatatggaaacttattcccatatctgattgctatgttagcaggagtattgcttggagaattgtcaaaaccggttctcgaacttggaagactcatccgaattcctgactttagtaatattttccacacagtcagtatttttgcagtcggatttccaccgatttcaaaatttataagtgcaattccgttggcgttgatctgttatgtacttgcgtttggagattttgttacatcacagacgttggtagaggaagcacaggacagtagaagtgacgaatatattgactttaattcaagcagatcaaacctgatcagtggtcttagaaacctgctccttgcaatttttgcaccgttcccaccactggcaggtccgctttggattggtatgaccgtatctgttgcaatgcgttataaagaaggaaagaaagcgatgaaatcgctgatcggtggaatgagttctttccgtatggcaacattcatcagtgttattttagtgccgatcgtgtcattcatgaaaccaatcatgggcgtgggttctgcgatcactttgttattccaggcatatgtatgtgcaagaatcggtatggattattgtaagacgagtacagataaaagtattgccggagtaatggcagcagtgcttgcattcaaaggttctggatgggctttgcttgtaggttttgcaatgaacatcttactgtctaatatggaatttcagaagaagaaattagagatctcagagacagaacaaaattaataaaagaattcaacaggagcagttagtctggaaaatagattagctgcttttttgtgtaaaaagcagccttaaacaaacgtaagcaccgcctctttaattttctgataatgtgattcagaaatcactattttcccatgctcggttgcaatcagtccctcctcgtacagacagtctaaatgtctgtatagcgtacgaaggctgatgttaagcagctgagccaattcttcttttgttgctttgacgatgacaggaaatttctgattttcacaacatcgaaatagatgaagcaataacctgtcttttgtattatttaaaagtaaatattcattttcattcaaaattcgttcaactaataaggacaaatgcttaaggctgagcactccgaattcaggatctcttgaaagttgatccagatatgtttgtataggaatacgaatataggaacaatcagaagcacagcgaatcgttgctgtgtgtctgtttaatgtaggatgtacagcctcaaataagccgtagatttctataggtttgcaggctacggcagtcaataattttccggaaggactgtatttttcagaataacaggcgccttttaaaagtatatagatatatttcgaaggcatatcattataaataagacaatcattcttggaggcatgctcaatttttagccctgcctgatcaagtaaatctaaaaaaattttagattctaaacttttttctaaaaattcttctgcatattcaacaattttttttagatctccggacattttttgttcctttcttctagaaacatgccaaatggcattttttaaaattccatcctaatgatatcataaaggccataagaggacaataaatttcaaccgttgtttcagtattaaattatttgggaggtattgccatgttaaacattactaatttaaaagaaactgtggaatcgatcataacaaatagtgcacttacgcatgagcaggctatgatcgcgttatcggatgtgccattgtcttatgtggaatttttcgaaactacaaatgagtttagagaattgtgtgaggcgggatgtttgtgcagaatggcagaaggaaatgtcacatatcaaccgagatatattcttccggattatgaaaaattaatgagagaaggatgcaaattcttacgtttggatccacctgaaaatttattcgaagcgattcagacattggaaatcttttatcgtcatgtcccatcagttacacattatccggtttacctgggatctgtagataaattgctggaaccattcatggatgatgagaatgcatataagctgatcaaaagctttctgatctttttagaccgctcaattccggattcttattgccacatgaacttaggacctgaagcaacaagggcaggtgagatgatcgttgagattgaaacagaattgaaaaatgcaattccttcaatcacactgctttatgatccggatataacaccggatgattttgcagaaaaatgtgtgatctgtgcattgaattgtgcgaagccaagttttgcaaatcacaaaatgtatcgcaagctgtatgatggcgcttatggaattgcaagttgctacaacgctttaccgatagcaggcggctcctttacattatctcgtgttgttttaagtagactggcagaacgtgcaaaagacagcgagcatttcctggaagagttattgccgcgcgcagtaaaagaactgtgtggatatattgaaaataaaatcgaatttttggtagaaaagagtcatttctttaaatcaaatttcttagtacaagagggatttgttaaggttgaaaatttcaccggcatgtttggtgttgtcggtatgaatgagtgcgtaaacacattgatggaaaaagagcataaatctgaccgttatggatatagcgaagatgcagatcagctggccatccgaatcctggaaaaacttcaggaatgtgtaaactcttttgagagtaaatattgtgattgcacggaacatcattttccattacatgctcaggttggaatagacagtgactatgatatcagtccgggagcacgtattgcgattggatcggagcttccgctgcatcagcatttacatcactgtgcaaaagtacatcatttcttcccatcaggcgtgggtgatattttcccgtttgatgaaaccgcaaaaagaaatccggatgctattttagatttgattaagggcggatttaaagaaggaatgcagtatttttcaacctattcgtctgattcagatgttattagaatcacaggatatctggtgaaaaagtcggatattgctaaattagacaatggtattgcagttcctcaggcaaatgcaaaatggggatattacgaagtgaaaaacagtaagatctatgaaagaaaggtgcggagcttaaatggcgatcgttaataaaattattcatagcagtgttgtagacggaccgggaaacagagcagctgtttttttacaaaaatgtaattttaagtgttcttactgtcacaatccggagacaatcgggcagtgtgttcaatgtggtgcatgtgtcgagaagtgtccagccaaagcactttccctgaaagacggaaagattgtatgggatgaagataaatgttgtgaatgtgatacttgtatccatgtatgtcctcatatgtcttcgccacgagtgaaagattatacagcggaacagattatggaacagattgcaccggatcttccatatataagaggaattacggtgtcaggcggtgagtgtacactgcaaagagatttcctggctgagttatttttattagcgaagcagcaaggattatcaacattaattgatagtaatggcagttatgatttttcacaggatgcagagcttatgaatgtttgtgatggtgtgatgttggatgttaaagcatttgattgcgatgtacataagaaattaaccggtatgagtaatgagcaggttctgaaaaatgcagtttacttagctgaacatggaaagcttgaggagattcgtacagttatagtaccggatcaactgcctaatgaagatactgtttttcaaatcacaaaattgctgaagccgtatttagataaaaaacaaattcgatataaaataatcgcttatcgtcagtttggagttcgttctccatataatcagattttcaggactccatcatccggtgaaatgatgaaatacaaaagaatcgcggaggataatggatttgaaaatattattttgatatagtaaaaggagggaaaagatgaagatttgtattgattgcgatccgggtgtagatgattctttagctatattatttgcgctggcaagaccggatgtagaagttgttggcatttctacaagtgttggaaacgtgacagcaaagcaaggcgctgacaatgcgttgagaatcttaaaattagcaggaatggagcataagattccggtatgtgtcggggctgaacaaccgttgaatggagatgaggttgatttcccggaatttattcatgggaaaaatggaatcggtaatgttgaattagcaccatccgatcaaaaacctgttgatatggatgtatgtgattttctgtatcagattgcttctgaaaatgaaggcgaactggtgttagtcacattaggacgaatgaccaatattgcaaaaacaatcaaacgttatccggatttcgccggaaagattaaaaaggttgtgtccatgggcggaacggttttagctacaggtaatgtttcgcctgttgttgaagctaatatcggaggtgatcctgaggcagccgacatagtcgttcaaacaccatgggatatgacaatggtaggattggatgtgacattaaagacaatcttaagaaaagaagacttagaatatgcagaaaaatattgcagagaagagtgtaaagagcagattcatttcttaagagaagagatgaaatggtatatgcagggcgcaagacagcagaattggatgagagaatgttgtccgcttcacgatccgctggcaatgatcgtagcggtagatccaagtgtggtaaagacacacagatgtgttaccagaatagaatgtgaaggtgcatattgtaaaggaatggtcgtaacagacttaagagaatatccaattgatggagaatatgtaaatcattgtatggaagttgattccaaaaaagttttagacactttgttcgcggcgttttattaaaaagtattaagaagaaagaaaacgtattctacgaggaggaaataaaatgagaaagatgaaaaaatggttggcacttatggtagcaggtatgatgacagtaggtttaatgggatgttcagggtcatcagatgaaggaaagaaagaatctggttcagataaagcagacatgaaagctgctgtggtttttggcttaggcggcctgggagatcagtcttataatgaccttgcatatgaaggtatggaacgtgcaaaggaagaactcggcgtagactatgactatgctgagccaaaagaagtaacagattttgagacaattcttcgtgcgatgagtgattcaaacgaatatgaagtaatcattggtgttggctttgattctgtagatgcgttagcatcagtagcaccggattatccggatcagaaatatgcttccattgattcatctttagtaggggataatattgtaagttattcctgcaaagaacaggaaggatcgttccttgtaggagcgttggcagcatatatgaaacaggatgcagctacatatggattagaagataatcataaatatggatttgtaggtgcacttgagaatgatattatcaaccattttgcagcaggatatcgtgcaggaatcgagtatgttgattctgatgcagatgtagcaatccagtatgtaggcggagataatccgtttggtgatacaacaactgcaaaagaaattgcaacgactcagaaggggaaaggttatgacatcattttccatgcagcgggcggatcaggtcttggtgtgtttgcagcagctcaggaatctgatttcattgcaatcggtgcaaactcaaatcagaatatcatagatccggatcatatcgtagcaagtatgttaaaacgtgttgatgttgcagcatatgatattgtaaaagcagcactcgaaggagatcttcaggttggaagcgaaaaggttttaggactggaagatgaaggaattggatatacattagatggcagcaatattaaagttccggaagatgtagtagaaaaattagaagagataaaagagaaaatcattgctggagaaattcaggttccggtagagctgtaggaaataagaaaagaagatgtttgaagtttaagcatcttctttttcataaaatatcgaggtggcaaatatgtatgctgtggaaatgagaaaaattacgaagcgctttggtagttttactgcaaacgatcaaatcgatttcttagtaaaaaaaggtgaaatacactgcctgttaggagaaaacggagcaggaaaaacaacattgatgaatgtgctgttcggtttgtacaaagcagacgaaggcgaattaaagataaacggtaaagagattaaaaaacattctgcaagaaatgcttttcaatgtggattaggaatggttcatcagcatttcatgttagtggatgcacttacagtatgggaaaatgttgtgatcggaaatgaaccaggaaagttcagtatcaataaaaaagaagcaataaaaaaggttcaggagttatcagacaaatatcatttcgatttgaatgcagaggctaaggttgcagatttgtcaattggtatgaaacaaagagtagagattttgaaaactctgtaccgcggtgcagaaatcctgattttggacgaaccgacagccgtattaactccacaagaagtattagagcttttggatattttcagagatatcagaaaacagggaaagacgattatcttcattacacataagctgaatgagacaaaagcggtatcggattcacttactgtattaagagccggaaaatcggtgttccaggcagctacaaaggatgttacggtagaaatgcttgcgaatgagatggtcggacatgaagtttctttccatttggagcgtaagaaacaggatgcaggtgaaacgatattatcaatcgagaatgtaaagttgcttgaaaatgcgtccaatacagtttcacttgatgttcatgccggggaaatccttggaattgcaggagttgaagggaatggacagatgcagttggaagagatgatcatgggactgcagaagtgtaaagaaggaaagatttccatcaagggagaagatattacagaatgtccaacgaaaaagcgtttgggacttggtatgagttatattccttctgaaagacatcagcgtgcaatccttccaggattttcaatcctagaaaattatctattgggaaatcagaatgatccgaaatatgttcagcatggctggattaatttcaagacattatctgagacaacaaaaaaattaatggaaaaatatgatgtgcgtgcggtggatgaaaagcagagtataggatctttgtcaggtggaaaccagcagaagatggttttgagtcgagaagtagaaaaagattctgatttcattctggtctgccagccggtcagaggtctggatataggagcaatcaattatattcatgaaatcttgttggaactgaggaatcaaggaaaagctattttactgatttcagcagaacttacagacattttccaattatgtgatcgtattgcggttatgtacaaaggagaggtcatggcacttggaaaaaatgaagaatttacaaatgagtcaataggtctgctaatggctggtcaaaggggcgtggaatcataatggaaaaacaaactgtaaaaaaacaaaaagtatttttaagtcttgaacaattatacttatcaatatttgcaattattttatccttattaattactgcattgatcatgcttgtatcaggggaaaatccaatcaatgcatttcaggcactgttagcaggcgctttaggatctaaaactgcgattgcgacaacattaggcaaaacagtaccgttattatttgttggtatggcatgtgcattttctaacaaagcaggcttatttaatatcggatgtgaaggccagctttatatcggagcattgacagcaacagcgacagcgttggcaatgcaggggcttcctagatttcttgttattcttgtatcatttttaacaggaatgatgtccggagcactggttggaggattcaatggccttttaaaggcaaagctgaatattaatgaagtacttgtggcaatcatgctgaactatattatgaagtttttcgcaagctactgtgtacatggtccgatgaaagatccgaaatccaaagttatgcaatcaccttcgatcggtcaggaatatatgcttacgaaaatcctgccaaaatctcagctgactacagcattgattctgggattgatcctggcagcactgttatatgtatttatcaacaaaacaggagcaggttttgcacttcgtgcagttggagaaaatggttctgcggcacaggcagcaggaatcagtatggttaagacagttattattacgatggcagccagtggagcgattgcagcattgacaggagttacggaagtattcggaaaaacaggaaagttcgtagacggattttctcctggatatggattcacaggaatcgcggttgctgtattaggtaataaccatccggttggagttatcttgagtgcacttttatttggaattttagaatcaggtgcaatgacaatgagttatgtggccggcgtttcaacaagtatgatcaaagtgatgcaaggtctggttattctattcgtagcgactccggaattagttgcattcatgaagagaaggagggcgaaataatggaaaatttagcacatcttttttctatggatatggtcatggttactttgcgaatggccattcccttaattcttgcttcaattggaagtgtaatctgtgaaagaagtggtatcattaacctcggaattgaaggtatgatgctgatgggtgcaattggagccgttatggggactgcttttacatcagttccttggcttggagttgcacttgcgattattatgggtggattattcggacttttacatgcggttttatgtatcaaatatcatacaaaccaggcggtcagcggagttggaattaacatttttgcttctggattgacattggtattatgtaaagtgatttggaataaagaaggtctgagtgaagaagttgctcagattccgacgattacaatccctggattgagtaagatccctgttctgggtgcattgttcactaatcagtcgccgtatttgtatattacactttttatagtttttatctcatggtatatcatgtttaaaacaaaagcaggcttgagacttcgtacgataggagatcatccgaaggcggctgcaacagccggagtaaatgttaaaaaatacagatatgtttctgttattttgtgtggaatgttgtgcggtttagccggttcttatctttcaattgttcagagtaatctgtttgtaaaagaaatggttgcaggtaggggatatattgcgctggcagcaacgatcttcggaggatggaatcctttgggatcattctttgcaagtcttctgtttgcattttcacaggcaattagaattataatggaatttgatattccggagcaattcttgcagatgcttccatatgtattaacaatgattgttttagttcttgcaggtggaaaatcaaaaggaccgcaggcatccggagatataaaagattgatggaacgttgaatgtacaggaggcacatagttatgaaaattgcagttgttggaagtattaatattgaccagtcagttgagacagatagaattccgcgaaaaggtgaaacaatagcaggacaatcattgcaatacactccgggaggaaaaggcgctaatcaggctgttgcgatgggaaggttaggagcagaagtagtattttttggctgtgtcggagatgatgcgaatggaaaagcaatgcttgaaaatttggaatcacaaggagtatctacaacacatatccaaacgatagaaaatgttcctacaggaattgctttgatcacagttggggatgatgataatacaattattattgtcagtggtgcaaatcattatgtggataagccgtatattgataaaatcaaacattacctgacagagtttgacctggttgtcttacaaaatgagattccgaaagaaacgaatctgtatgtgatagatttttgtaaccagaatcatattcctgtactttttaacccggcaccaatcgaaggggtggatatggatattattgaaaaggttacttattttacaccaaatgagcatgaagcagaattactttttcagacaaatgattatgaggaattagtaaaaaaatatccggagaaacttctgattacaatgggtgaaaagggtgtacttgtgcagttgaatgacggagagacattgactgttccggcaagaaagacaaaggttgtcgatacaacaggagcaggagatacattaaacggagcatttgcaatgcagatcgcaggcggagcatccgttaaggatgcattacaatttgcaaatgttgccgcaagtctgtctattgaaaagttcggagcacagggcggaatgcctacttatgaagaagttgttaatgtattgatgaaataagatcctgaagcaacctgagttaagaaaatagaaaaatgattgtaggagaattttgttatggcattagataaagaattaaagacattaggaaagaagcagtaccatatacatttaaaacccggagatatcggaaaatatgttttattaccgggagatccggcacgttcagaccgtgttgcaaaatatctggataatgctgaatttgttgctgaaaacagagaacatcgtacatttacaggatattataaaggggtaaaaatttctgtaacttccactggtatgggatgtccttctgctacaatcgcagcagaagaactgatgaatattggtgcagaatgtttgatccgaatcggaagcagtgcagcgttacaggatgacattaaaatcggagatttgatgatttctacaggttctatgaaaaatgaagggacaagccgcttttatgtaccggattgtttcccatctgtaccggattttgatttaactcgtgagattattgatactgcaagagagatgcagccgcagctatccggaaaagtgcattacggaatcaatgcttctgatgatgctttttatggtgagacagaggagtggattcagaaattatccggcttaggttgcttaaatgtagaaatggaaagttctgctctttatacagtttgtcaccgtagaaagaaacgtgctgctatgatcagtgcagtttctggaaatctggtcacaggtgatgtaatttatgaaaatgtaaatgagggacttgtaaaaggttgggacgaagaaattaagattgtgttagaagcaatttatcgtttcgagcaaaaactgcaggcagaaactatttaaaagccaattcacttttaacagtttttagcccttcaaatagctgcattctttcgggaatgcggctatttgttttttcgctactggcaatcatttgcagatagtagcattattgttagatgtagagaaattcgaagattggaatgtttgtgatgttatgtcttaacgacaattgatctgtttgtattaagctttatgtgtatcctcacagggcttttgaaccagaacagctatttgaaccggacagtagaagaaccacgcaatggtcagtgctcattgtactttgcaaccgacagatgtaaaatctatttgtcctcactttcgaggacagacggattttttcttttttgttataataaaataaaagaaaagaacacatcggatatgtcgcaaaaggaaagggggatggtttgatgcggaaaattgtggtcgatatgcagaattttctgtttgctgattccatagcgaccgcattcagaaattcagattatgagatcgatgtgattcgtacggagtctccgaaggatacggttgaattgtgtcaggtgtacaaaccatttgttcttataatggaagtgacaggttatatcccgtggaacctctgtgagagagtgaagcttcgtgatgaagtaaagaaaatgtgtccccactgtaaaattgctctcattgtagattccaatacggaacgacaggcagcgatagagattcgggatgcaaagaagaatggttttattgatcagtttttctatggatctatgacagctgaatatctgatggatcagatttatgcgatgtaaaaaggcagcaggaaacaaaccgtgatttgtctgtagaattttaaaatgtagacagatcataagttgaaaaaggaggagtcagtatgggacttattaaagcaggtatgggtgcacttggtggaacattagcggatcaatggaaggagtttttctattgcgaatctatgccgaaagaagtgcttgttacaaagggtcagaagagaacgacaggtcgttcttctaatacaaaaggaaatgacaatatcatttctaacggttccggtattgccgtggctgatggacagtgtatgatcattgtagaacagggtaaggttgtagaagtttgtgcagagcctggtgaatttacatatgatacctcaacagaaccatctattttctcaggtaatctcggtgagagcattaaagagacatttaaaaccgtaggcaagcgttttacttatggtggagatacaggtaaggatcagagaatttattactttaatacaaaagaaattctggaaaaccgtttcggtacagcgaatccggttccgttccgtgtagtagactccaagatcggattggatattgatgtatcaatccgttgttcaggtgtatattcttataagattgttgatccgttgttgttctattcaaatgtatgtggaaatgtagaacaggaatattcccgtgaagaacttgacggtactcttaagaaagaatttatctcagccctgcagccggcatttggccgtttgtcagagatggaacttcgtccaaatcagatcgtaacacacaacacagatcttgaaaatgccatgaatactgcactttcagagaagtggggtgctcttcgtggactgaaggttgtcagtattgcttttggatcaattactcttccggacgaggatgcagaactgatcaaacaggcacagcgtacagcaatcatgcgtgatcctacaatggcagcagctacacttgtcggtgctcaggcagatgcgatgaagaccgcagcaggcaacgaggcaggagctatgacaggattcatgggcatgggtatggcaatgaacgctgcaggtggtggaatgaatgcacagaatcttttcgctatgggacagcaacagcaggctcagcagacagcacagcagcaggcagctccgacaccacagccggcaccggtaccgcaggcagctccggcagcaggagaatggaaatgtgcatgtggtactacagtaacaggtaatttctgtccgaactgtggagcaaagaaaccggaaccgaaaccagaaccgggcgcatggaaatgctcttgcggagctacggtgacaggcaacttctgtccggaatgcggttctaagagaccggcagaggacgaaggctggacgtgttcctgtggcgcagtaaacaaaggcaaattctgtacgaactgtggagcaaagaagccggcaggcgcaccgctttaccgttgtgataagtgcggatgggaaccggaagatccgaagaatccgccgagattctgtccggagtgtggagatatctttgacgagaacgacagacagtaacggatgaatagcggttagaaaataactgccggaagcccggcacggaagaaaggagaatgagttatggcaggcttgcaggaatataaatgtccttgctgtggcggtgcgatcacctttgacagtaagattcagaagatgaagtgtccgtactgtgatactgagttcgagatggatgcactcaaaggttatgatgcagagctgcagaatgaacagacagatgacatggagtgggatacttccgcaggcagtgaatggcaggaaggtgaagcagatggtttacgcacgtatgtgtgtaagtcctgtggaggcgagatcgtcggagatgccaacatggcagcaacatcctgcccattctgtgataatccgatcgtaatgatgggacaatttgcgggagcattaaaaccggatctggtgatcccgttcaaattagataaaaaggcagcaaaagaaggattgaagaagcatctgaccggaaaacgtcttctgccaaagatcttcaaggatcagaatcatattgatgagattaaaggtatttacgttccattctggctttttgatacaaatgtagatgccacagtccgctaccgggcaacaaaggtacgaatgtggagtgacagtgattatgattatactgagacaagtcattttatggttcaccggggtggaagtattggttttgagaatgttccggtagatggatccacaaagatggcagatgatctgatggaatctatcgaaccattcaatatttcaggtgcggtggatttccagactgcttatctcgcaggatatctggcagataagtatgacgtaactgctgaacaaagtattgaacgtgctaataaacgtgtaaaacattctacagaggaagcttttgctgagacagtaaaaggttatgctacagtaacaacagacaatagcagtgtacaatttcatggcggaaaagcaaagtatgcactgtatccggtatggcttctgaatacgacacggaacggaaataaatacacctttgcaatgaatggacagacaggaaagtttgtcggtgatctgccggtagataaaggtgcagcagcacgctggacggtgatgctggcagctgtattctcagttgtaacgtatggtgctgcatggcttttgcacctgatcggactgttttagggaggtggggaaatgaagaaaagaattttatcgtttatgacgatcctcatcctctgtctaggtcttgcagttccggcttttgcggaggaaacagaaggatttgcgaatgaatatcctcgtgtcatcgacaatgcggagctcctgtctgcagatgagagggagctgttaaccagtaagttagatgagatcagtacgcgacagaaggtagatgtgacggttgccacaaccgatacactggatggactgacggtatctgattatgcggaacgattctacgagtctcataattatggttatggaccggacaaggatggaacaatacttctgatcagcatggaagatcatgattggtatatggcaacctacggatatgctattacagcatttacggatgcaggtatccagtacataggagaagagatgacgggtgatttgtctgatggtgattttgcggcagcatttgacacatttgctgacgagtgtgatgattttattacgcaggcaaaaaccggagaaccttatgatatcgataatgaaccacaaaaaccaatgtcatggatctggattccgatttcattagtagctggtatcgtcctttcattgattgttgttggcactatgaaatcaaagctgaaaacagtacgtttccaggcagcagctaataattatgtgaaagctggaagtatgaatcttactgagagcagagacatattcctgtataatacaatgacaaaaacaaaaaaagagaaaaatgattcttccagtggtggcggcggaagcagtacgcatacaacatcttccggaagcactgccggaggcggtggcggaaaattctaggagagatgtctggatacagaataccggggcgatttaatagtgaaaaaagagaagctggttcccaaatgcttgggaattggcttctcttttttaatgatgtaattatcttttcacatccacaaaatgtttcctgaactcatcataaggacacgaccgtccccagtagaatccctgacagtaatccggcctgttttaattctttcaggaagttttgcgccttttcatttttttcgagcagaatactttctgtcagttcgattgcaattgcagcaggtggaagaccagaagcgtccatctcgctgataaggtctgtaataatatctgattttgtgatctgcacctgggatacattaatattaactttgaaatcaggaatttgcatccggattttccggcaggcggttattgcttctcgcatgaaccagcgtccggttggaataatcagtccgcttgtctctaaaagtggtatgaactcagcaggtgagatcggtccaaattttttagaagcaaagcgtatcagcacctctgctccggtcagtttatcctgtcggatatccatgactggctggaagattattgagaatccacggaaatcatgatttactgctgaatgaagctcatttgtgatctcacggatacgtaagaaattctggtactcttcttcctggaatatataacagcagtttcttccatgctgcttagccacggtcagtgaaaagtcagttcgctttataatctcttcataaccggtccgtgatagatccggaagcggcaggataccggcagaaatagtaaataccgcagcaaagttgttttcttcaataaactgattaatatgtttgcatatgcaagtttccgttttcgttttatgcggtacagcatgagatcacttcgttctgaaaagacagtgccaaacaggatgaacaggattaaagaaatccataatttttcttaaatttcataactttttccttttatagaatatcacttccatccgggatcttggaaataatcgttcgattagtcctgaacagaaagataagtgagacaatcagtgacatgacttccgcagtcaggaaagcccaccatactgcatgaagcccaccaaattttgccagtacatatgcagccggaatcagtactacaagctgacgcatgatggatacgatcatactgaacacggcctttccaagcgcctggaatacagtaccacagatgatgccaaaccatgcaagtaagtaatggataccgatgatacgaagcgcagggacgccgatcgtaagcatatcagcagatgcgttgaacattccaagaagtacctgtggaactaattcaaagcaaaggaatccgaagagcataatgcaaaatgctgttgccatactgagtttgatcgtcttgaccatacgttttctgttctgcgcaccgtagttgaatgcaatgatcggagtgataccgttattcaaaccgaagacaggcatgaagaaaaagctctgcagtttgaaatacactccgaatacggcagttgcagtagatgaaaatgtgatcaggatacggttcatggagtatgtcataacagaaccaatcgactgcatgataatagatggaataccgattgcataaattgttctgataatttttccgtccggacgaaaaccacggaactgaagccttacatccgggttgaatttatgattacatgtaaatgaaacaagtgctccgacacactgtccgatgaccgtagccacggcagcacctgtaacccccatcttcgggaaaccgatcagaccaaagatcaggatcgggtcaaggatgatattcgtaatcgcaccacataactgggaagtcatactgaaaatggttcttcctgtggaagtgagcagtcgttcaaagcaaatctgtgccagcagtcccatagagaagatcataactgtgctcagataatcaattcccatttccatgatctcaacgtctgcatttccaatctggcttgcatagaacggttttacaactgtaaagccaaggataagaaatacaatataacttatgatataaagaaatgttccgttagacgcaatcttatttgcttcgtcagttttttttgctccgagtgctctggaaagaagtgcattcataccaacgccggtaccggttgcaactgcaacgagcagcatctgtaacgggaaggcaagagaaactgcggtaagagcattttctgacagttttgctacaaagatactgtctacaatattataaagtgcctgcactagcatggaaaccatcatcggtaaggacatgttgaacaagagtctgccaatcggcatggttcccattttgttttctgctgcaggggcagaagcagttttttggttcatatattctcctgttattactaaaaattcatttaaagtgccaattattaataatagcattatatggtgtacgtttcaatagttgaagacttgaaaatgtcttaaaggtcagtttggcattcttgaattattgtgttaataggtaaagtcagtagaagtaatagtaacaacttgacagtttgcgtactgtatgatattttctaagtagtaagtagtaagtagtaagtaaaatacaaaaatggtgatcaggaaataagaggttactgttcactcccgtgtcaatcactccgctgattgacacggaggatgcgcgttttgacttgaatgcatctcgccccatcgccaaaggcgatttaaaatggcgagatgcgttgctggtcgcacatcgtgtgaacagtaacaataagaggaaagagagaaagacaggtatgaaagatcttacattatctcagcaatatgcattacttgcgttggacggacaggagagtattcatccaagcgtggcaaaaagtgctgtattgagagctgtttcggctgcgcgggtgttggagacagaattaggaaaagcagatgcggattcattttcagaattttctgaagaactgcagaaagcggtacagatggcaaaaacattaaagaaaaaagaggagactcagattgagaaagaagtggctgctgttttggaagcagaagaacttctaaaggaagtaccagatattttgggctgtgatatgaattatgatacatcaggtgttgaactaaaggcataccttagtgatgagacaagttatatcagaataaaagaaggacttcgcgcagagattctagaggatggtccaattagtctggaagatgcggttctcttatggcttctccgtgaaagtggctgtatccatgatttattttctgtatcagagcagaaccgtgtatcagagcgtatgacagaagctgccgttcaggatgagaagtaccgtgcattatgggaagcagaatttcataatgtttttgaaggatttatgaatcggtttgtgaagactaagagcaaactgcttaagaatccatatttagagggtgttaatcttgtattcccgtatcttgacagaagaaaatctgtatttattgatatggttatttttggaactaacgtggcggacagaagagctgcggctgtagaatatctgaagaaaaaaggctttgcggtagaggagatcagagtaggcagtgagactttactaaaaataggcaatatatattaccgtatcttcccaatgacgaaaacagcatataaagtaccgattcagggagtcaacctggtaccggcatactggcagtaggaagaaagtactgaaatactaattatgtggacagtagaaaaggtgagtagatgtcaagacagagaagcatggaagtaatagagcaggcagaatatgtgacaatcggagagcttgtgcggcttacggcagtgcgttacagtactttgaaattttatacagaggaaggaatgctgccgttcgagcaggcagaagagaatctgaccagaagataccgcagagttgagagcttagaaaggattgcgcagattcgtcggttaagagaacagaagaagacgattccggagattaaagagattctgggatgtggtgaactgtaaaatatgaatattatctagaaaaaatacgaatctccagaagaagttcaagtataaaaatactgatttctactggagattcgtattttaagaatatgtgttaatattggaaaattatgcatccagtatgctttctgcaacttctggaagaatttcactgactgctccatggtaagctgcggttgctttttcatccagataatgtggttccttgtggattacgatcaaatctttacctgtgaaatgcggaagcatatctttgcacagactggaattcaggttcattccgagaacgagaatcgtatcagctttagcaacttcttccacagcatggctaatgacagtattactgagcatttcaccatgtaaataaactccaggatgaatcacagttgatttacacacatcacaaagaggaactttatcactgtttttgatatattcaatcgggaaaatctttccgcaacgtggacacgcattattttcataaatatttccatacatattgatcacatttttacagccggctttctgaggcatattatagatgccttttgtaatgattgtctttaaatatcctgcctcttctaatcttgcaagtgcttcatttccctttcctgcctccagatgtttggaaagaatttcatttctataatattcatagaataattctgcatgtgtgttaaacatacgggcactgaataattcttccggagagtagccatacttttcttcaatccgataggattcgtcgctgtctcgatgatatgcgacattttgctctctcataaattccattccggcgagacaaacaagatatttagatgttctaattgtttcttcaagatagtttaaattcataatcatccctgcctttacaaaatgctgctgttaacgagttactataatgctagtatagcataaataaaaagaattgtctgaaaattcaaataaaaacaggataaaatttaaagaaaaactggacaaaataaaatttacagttgacaatagcgggagaataggctatattaagaatataataatagtaattattattaaaataagaaggaggttatcacatggagaaaaaagcactttataatttgtcttatggagtatttatgttatctacacgttccggtgagaaagtaaatggctgtattaccaatacatgtatgcaggtagcgaatgacccagttcgaattgcgatctctgttttgaacagtaattatacctgtgatctgatcaaagaaagcggaatttttgcactgagtctgttggatgtagaatgttcctttgagacaattaagcatttcggattccagtcaggaagagatgtggataagatgaaagatcttacgttaccggtagatcagaataatattccatatatgggatatcaggcatgcgccgtgatcagtggtaaggttctggaacagcaggatctcggtacacacactctgttcattgcagaagtaacagatgcaaaactgctgaatgagaatgcaccgcttacttacgccgactatcagaatcgcgtaaaaccaaagaagaaagagatacctcaggataagaagatcgttggatggagatgtaagatctgtaattatgtatatgaaggcagtgaacttccggcagattatatctgtccaatctgcggacatgatgtcagcgattttgaaccgatttttgaaaattagtggtaatgattcattgatcttgttgtgtagtgaatggatgcaaggtcaggaataattataaaaataaagatgaaaagaaaaggagatatggaattatgaaatatgtatgtgatttatgtggatgggaatatgatgaagagcagggatacccggaaggcggtatcgcacctggaacaaagtgggaagatgtaccggaagattttgaatgtcctctgtgttctgctggaaaggatcagttctctgaggagtaaatagaacagttacgaaaatttattttaaataatgaaaacaggtggtagaatagacagagaactattttatcacctgttttacgttacgaaagagaggaagaaaaacatgtatcaggcagcaaatgacagatatgagaaaatggcttatgtacgttgtggaaagagcggattaaaactcccggcaatttcacttggattgtggcacaactttggagataccggtgtttatgagaatatgaaggaaatccttttcacagcatttgataatggaatcgtacactttgatctggcaaataattacgggccggcttatggaagtgcagagaagaattttggtaagattctgaaagaagaacttggcgtgtatagagatgagcttctgatcagcacaaaggccggttttgatatgtgggaaggcccttatggaaactggggaagcaggaaatatcttctttctagtctggatcagagtctgaagcgtatggggctggattatgtagatatcttctatcatcaccggatggatccggagactccgttggaagagacgatgggagcacttgcaagtgcagtgcagtcaggaaaagcactttatgtggggctttcaaattatgacggtccaacattggaaaaggcagaggcaatcttaagagacttgaagtgtccatttgtgatcaatcagaacagatattctatctttgacagaacaattgagaaaaatggattgaaagacactgcgaagaagctggagaagggaattattgcattcagtccgctggcgcagggacttcttaccgaccgttatctgaaaggaatcccggaagacagcagaattatgacagacggacgtttcctgaagaaatctgctctgacagaagaaaaacttgtgaaaatcagagaattgaacggactagcagccggaagaggtcagacattggcagagatggcattgagttggattttgaaggatggtattgtaacaagcgttcttgtaggcgcatcaaaaccggaacagatattggataatatcaaggcaatacagaatacagaatttacagaagaagaactccgcaagattgatgagctgtcgctcgtttaagctagttgtcactgttaatctgtgttatactggttaaaaatgaaaagttgaaaaaggagaatttaccatggatagaattgcaagctttacaatcaaccacctggatctgatgccgggattgtatgtctcaagaagagacgcaaaaggagattgtgtcacaacaacatttgatctgagaatcacagcaccgaacagagagccggttgtggatactccggcacttcatacgattgagcatctggcagcaacttatcttcgtaacagtgagaagaaggatgacatgatctactttggaccaatgggctgcagaacaggatgttatcttgtaatgttcggtaatctggattcagaggatgttcttgatctggttcttgagatgtgtgatttcattatcggatttgaaggagagattcctggagcagcaccggagcagtgtggcaactatcaggagcagaaccttgatatggcgaagtattatattaagaaatacaaagatgcattggtgaatgaccgtcatcttgtatatccggaataatgaaaagtgggaattgtctgacgagttgttttcagataattcccacttcgattatacagatctgatttttaacataatatagcatgtcactgagaggaattgcaaaaatgcaaatttagttcttaagcaattccgcattcttatgaattgtctcattaacaatattctctacataacttccgatatgttttttgacatccttatccagttcatttggatagatcggagtaccgtattcgagaacaacatgtgttttcttgatctttggaaaatgattttcgaaaatttcagcagtattattcatagaaatcggtacgatcggacagccggtctttgtggcaatcttgaaagcaccttctttgaaaggaagaagacttaattcttcacctttatttcttgtaccttcagggaagatacagatagagataccgttctttacataatcgattgcctgcaggattgtctttaaaccttccttcggattctcacgatcaaggaaaagacaatagacaaaacgcatccaggtagaaagaagcggaatcttttccatctctttctttgccacataacctgtaagattcctgcatctgctgtaagtgagcagaatgtcaaagaagctgcggtggtttccgataaagagaacaggttcatccggtacattctcctcaccgatcacagtaactttcacaccggtcattttcaaaatcactttaaatccccactggacaatacgcagagaactgatgtcacgcgcatgtaggttgaatttaccgatcagccattccacaaagaaaacaggaatagaaagaattaggtaaagaattagaaaaattgcaacaaaaataaatcgaaacatataatatcctttctttatcttaagaataatagagtcgccataatataaaataactactggcgcatgtagctttattataccgtagcagcataaaaaatacaactgatgcatagattgaagggaaataaaaaaaccggatggcgttactgtttacagtatctggaatattgtaatgaaaaataaaaaacaaaagggcattttagctgtgtttctactgtgtgtctgtttttttataagcggatgtattaccaggattgagaaagagcaaaaacgaaaagatctggaatatattctgatcgaccaggagcatcttccagaggaaatgacagaagtgctcggtcagttaaaaaagaaagcatttcattttgtttattcggatcagggaaagacgtatcttgcagaaggatacggtgcatgtccgacaacaggatatactattgaggtgaagaaactttatgaaacggagcatgcagtttgtttgaatacaagtctgatgggaccggcaactggtgaagagacgaaagaaatcacgacatttccatacatagtcgtggaaatcagtgaaacagaaaaagaggttatgtttgattgaggaggagcaggatggaaattgtgaagagagcgatacgcctgatgcatgagggaaaatgtatttacgatcagtttcagctggacgaagactataacgttccggatgcgaaggaggatgtgggaaatgtaattgaagggacagtctgtgtgaagacggaagatatgaagcttgtagagaattatctgaaaatcagtggaaaagctctatttaagattttgtacatgacagcttctctggatccgcaaccggcagttttagaaggaaagcttccatttgaagaaatggtatatgtagaacaaccgggagaggaagaatattttctgaaaaatctcagaacagagttcagtgtatcaatggtgcattctagaaagctgagcctgcatctgctgacagaacttgaaattggaagaactcagatgataagtgaagaagtcacggaagatgtggaaagtgagcatgctgtttataaaaaaatgaaaaagttccgtctgcttggattgtcagacacaaaaaaagacacttatagaataaaagaagagattacattaccgggaacgaaggagagtatcagccagattctgttgtccgaagtgagcggtagaaagttagaactgcgtccggggacagatgaggtgacagtcagaggagaactacaggtgttctgtctctatctgtcagaagaatcgaaggcagactgggtcagccaggtgattccatatgaaggaaaacttctttgcaatggcttgacagaaggaatgttttattctgtggaacatacgctggaggatacactggttgatatccgtatggatgaggacggtgagatgcggatccttgggattgaagggacattactgctgcggatgaacttttacgaagagcaggagatggagttgttagaagatatttattctttgcaagagcagtgtattccggagaaacaggagacggtttttgaagagcttttaatgcagaaccaatccagatataaactaacggaacggctttcacttccagaattaaaagatgatgtacttcaagtactctgcagcagaggggaaatccagatagaacatacggagtatagagaagaaggaatccaaatagaaggaatcctgcatcttaactttctctacctgagaggggatgatgcaagaccatatggaagctggcaggggatgataccattccaacatctgatcgaatgttccaatcttccggaaaatgtacggtgtacgatgagtcatcatgtggatcagatccaggtgtctatggcaggcagtgaggctgtagaagtgagagcaattcttgcatttgatgcattcttacggcgggaggtagaacttcagacaatcgtgtctgtcatggagaaaccgctggatcttgaacagatggataagaggccgggaatcgttggtcatattgtgcaggagaaagaagatctctgggagttggcgaaacagtatatgactacagttgaggggattatgaatgtaaacgaattggaaaatgaaaatgtgaaaataggggataaattgttgatttttaaagaaaatatgagtatactgtaagtactatgtatacaagatacatttgtgtaaattttcacatctggttctttagaaaacagcgatggaggtacacaggatgaatcaaattgaattaaaagcacttgccaagattaatttaggcctggatgtgcttggaagacgcgagaatggataccatgatgtcagaatggtcatgcagtctatttatctgtatgatgaagtgaagattgcgaagaagaaagaacctggaattacactgacaacaaatctgaagtttcttccaaccggggatggcaatatcgcttataaagcagcgcagcttctgatggatgaatttgatctgaaagaaggggttcagatcacgctgaataagcacattccggtagctgccggtcttgcaggaggaagctcgaatgcagctgcggttctgtttggaatgaaccggctcttcggactgcgtctgacccagcaggaattgatggatcggggcgtgaagcttggagcagatgttccttattgtatcatgagaggaaccgttcttgcagaagggataggagaagaattaagtgtccttcctgccatgccgaaatgtacggtactgatcgccaagcctccgatcagtgtttcgacgaagatggtgtatgaagcactggactccaaagagattgtcgagcatccagatattgacgggatcctggaaggacttcggaagggagatcttcacaaggtcgcagattctatggggaatgtgttagaggatgtaacaataccgatgcatccggtgatcgcggatatcaagaaggtgatgcaggattgcggagcaatcggggcaatgatgagcggaagtggaccgactgtgtttggtctgtttgaaaaccgggcatcagcaagagaagcacagaggatgattcgggacaaaggtctgacaagacaggcatacgtaacgaatatacacaacgttaggaggaagtaaaatgggaactgattttgaagtaacaatgaacgagtatctgcctctgagagatgtggtatttaatacattgagacaggcgatcctgcgtggagaactgaagccgggggagcgtctgatggagattcagctggcgaacaaactcggagtgagcagaaccccgatccgtgaagcaatccgtaagcttgaactggaagggcttgtacttatgattccgagaaaaggtgcggaagttgcagagatcacagagaagaatctaagagatgtgctggaagtgcgctgtgcgttagaagagcttgcagtacagcttgcgtgtgacagaatggatgaagaaggagtgcgtgagcttcgtgcagcagcggagacatttgagtctattctcaacagtgatgatattacacagatcgcacaggcagacgttgcatttcatgatattatctatgctgcaacagataaccgcagactgatccagcttctgaataatctgcgcgaacagatgtacagatacagaattgaatatttaaagaagaaagaatgctacccacagctgttgaatgagcatcagacaattattgatgcgattgccggacatgataaagagctggctacaaagtttacaagccagcatattaagaaccaggcagaaacggttgtcggcactatccgtgagaaagaagaaaatgcttaaaaaataaagaatgtgcctcggcacattctttattctatatgtatggaattcgtttttgtggaaagactccatgtatgaacagaattgatttatcatgttactgttcactcccgtgtcaatcactccgctgattgacacggaggatgcatgttttggcttaaatgcatctcgccccatcgccaaaggcgatttaaaatggcgagatgcgttgctggtcgcacatcgtgtgaacagtaactttatcatagatggaggatgatattatgaagaaacggtttgcattgctcagaagaaagcttaagtctgtccgagaagaaaaactgccgggaagagcagtgattttttcagtggcagcgggacttctgatcgctgctttcttcacaggaatgatatatacaaaacaggaattatatgcacaggaagaaacgcagaagcatctggcgcaggaagtgtttcgcttccatgtgttagcgaatagtgacagcgaaaaggaccagaatctgaaattgcaggtaagagatgcagtattggattatatgaaagaagaattgtcagaagaaccggaagagaaacagtgtcttaagcagacagtgcagtgggcacgtacacatacagatgagatccgtgcaatcggagaaaagacagttgcggcggcaggagaagatcagagtgtgaatgtggctgtaacaacctgttactttcctgacaggacttacggtgatgtgacatttcctgcgggaaattatcaggcactgcgggtggaactggggagtgcagagggacataactggtggtgcgtgctttatccgaatctctgctttttggatacaacgaatgcggtggttcctgacaaaggaaagaagcaattaaaacaggtactgacggaagaagaatattccaaagtgacagcgaatacaaagtttaagattggctggtatttttggaaataagaaataaaagaggttaagaaaatgtatgaatttgacagcagagtacgttacagcgaggtagatcaccacggtacgatgacagttccggcgttgatcaattattttcaggactgcagtaccttccagtcggaggatcttggaattggtacaacagttctgaaggaagagaaaagagcgtggcttttatcttactggcaggtgatcctgaatcggaaaccggagcttggtgagaagatcacaatcggaacatttgcaacagaattcaagggattgtttggaaacagaaacttttatatgaaagatgcagatggaaaatatctcgcctgtgcgaattcagtctgggcatttattgatacagagacaggaagaccaaccaggccgcagccaaaggatgttcagttgtatggagtagaagaaccacttgatataccatatgagggaagaaaaatccgacttccggaagagacagatgatctggaagcatttccggtcagaaagtatcatattgacacaaatgagcatgtgaacaactgtcagtatgtgcagatggcattggaatttcttccggatgatcttcagattgcacagttgcgtgtagagtataaaaaggcagctgtactgggggatatgatctacccgaagctgagtaaagaagcagacagaatcgttgtggaactctgtgacgaacaggcaaaaccatatgcagttctggaatttaaagaagaaatataaaagaagagatagaatagaaaaactcccggatgttcctacagaaatttctgtgaacattcgggagttttttgttgcgaacaagtaacgttcgcaggtgatatttacttatcaagacttgccaggacatcttccagaacatcctcaacagaatcagttacttcatccgcatagtaggatacaccgggtgcactgtttgacattgcgtagctatgaccgaccagttcaagcatttccagatcattatactgatctccgaatgccatacattcttccggctttacatggaataatttcatcaggttagaaagagcagcacctttatttgttcccggagcaatgaagtcaatccagatatttccggaagtaacaaccttaatctctgcaccgaacatttcctgtaagtgttctaaatattgcatgattacttttgtgtcatcaatcatattacagattgcaatcttgagaaatggaccttcgattttgcttaggtcgtctacaatttttgttgtgttctgcatgatatttacaatatgatttacaaaagcttcatgattatcttcaatcagacaagcatcttctctggagatgagaatatcaaaattcggtgattttttcacttcatctataatgcggcaggcaaggtcatctgcaattattccgcgagagattacctttccctgatgaatacagatggaaccattttctccgatataggaaatctcgtccttaatctcagaaaacagtctgcgctcattatcatactggcgtccgcttgcagcaacaaagtgaatgcctttttgtgtcagttcatgaatcagctctatggcacgaggagtcagtttctgtgctccgttatgaagaagcgtaccatcaaggtcgcttgcgattaatttgatcatatgtaaaatcctcctgatttttcaaactctgtttacgcaaaaaaagtttaacatcatctttcgaaagaatcaagaaagttatttcgcaatcacttcttctgcacgtttcagtgcagcgctgatattcggctggaagttctcttttccaaccagttctgtgaatccggctttctccataactttcattggctgttcgttaacgtgggagaagacaaccgtaattccctttgactcacagacttctaccagatcaaccaaagcattcatagcagtactgtccagtgcaggaacgcttcgcatacgaagaacgaggcaggtagtaaaatcttttacgacaatgtgttcaatcgcacttgctgctccgaagaacagaggtcctgagatttcgtagacacggatctgaagtggaagtttctgaaggcgttcatcgacatccggggtatcatcatccacataagtccagctgttgacgtgtgtttcttcgctcatacgcttgataaagagcaggcaggcaagaaccataccaatctcaattgctacgaccaggtcgaagagtactgtcaggataaaggaagcaaaaagtacaatgatatcactctttggagcagtcttgaccagttttacaaaggtacgccactggcacatattatatgcaacgataaacaggattgctgcgattgttggcattggaatcattccggcatatggcatcagtacgacaagtacaatgaccagtgtaatggaatgaacgattccggcaatcggagtacgtccgccgtttttaatatttgcagcagttcttgcaatagctcctgtcgcagggattccgccgaaaagggcagaagcaatgttgccggctccctgggctacaagttccatgtcggaacggtgtttaccgttgatcattccgtctgcgacaacacaggaaagcagagattcaatcgctgcgagaacagcaattgtaaatgcgttcggaagtgcattttgaacaacttcaaatgatacagctggaagatggaaggatgggagtgagttgctgatcgtataaagatttccaattgtagaaacttttaacggcaggaactgaaccatcaggattccaatgataactgcgatcaaagatccagggattcttttgaagatgtatggagcaatgatcagaacagcaagacttactgcaccgacaatcagtgcatcaatattaattgtagagaagttttcaacaacagcacggaatttctctgttgtctcgatcggttttaccccatccggataggtaagtccgaagaaatctttcagctgtccgattacaattgtaacagcaattccggaagtgaatccggttgtgatcgtaaatgggatgaatttgatcagacttccgaaatggcacagtcccatcagaaccagaaagataccggcgaggattgtcgcaatgacaagtccatccattccgtctttggcaacaatgccggcgacgattgttgcgaatgcagctgttggtccggcaatctgtacactgcttccgccaagtgcagagatgacaaatccggcaacgattgcagtgaagataccagcttccggtcctacaccggatgcaagtgccagtgcgattgacagcggcaatgcaataattgctacaatgattccggcagtcacgtctttgatgaactgagaacgattgtagctctttaatgatgtaagtaacatcggcttcaatgaattcatttgatagatcaatcctttcttttatgataactataaaacataacctttcaagtatagcatagaaaaagggacactgagaagaggaaacagtgtatgtttttaaagacatgaagaggttattgttcactcccgtgtcaatcactccgctgattgacacggaggatgcatgttttggtttgaatgcatctcgccccatcgccaaaggcaatttaaaatggcgagatgcgttgctggtcgcacacagtgtgaacagtaacatgaagaagaatgttaagagaaaaaagcttgtatctgatttataaaggtaatataataggaataacttgtaaagcatgttttatataatgaaaacatgttttacggtagtaaatttgtgaatagatctgataacaaaagggtatcacaagaaagaaaaggaagattattatgggaaaatattttggaacagatggtttccgtggtgaggcgaatgtagttcttacagtagagcatgcatttaaagtaggacgttatcttggatggtatttcggacaggaccacaaggccagaatcgtaatcggaaaagacacaagaagaagcagttatatgtttgagtatgcacttgcagcaggattgacagcatcaggagctgacgcttaccttcttcatgtgacaactacaccaagtgtttcatatgtagtaagaacagaagattttgactgcggacttatgatttcagcgagccacaatccatactatgataatggtatcaaggtaatcaacagcgaaggccataagatggaggctgaggttgaggcaaagatcgaggcttatatcgatggggagattgatgagatcccactggcaacaaaagagagcattggccgcacagttgactatgcagcaggaagaaaccgttatatcggtcatctgatttctcttgcaacacgttccttcaaggatatgagagttggacttgactgtgcgaatggtagtgcgtcaagtgttgcaaagagtgtattcgatgcacttggagcaaagacttatgtaatcaacaatgagccaaatggtgtgaatattaatacaaactgtggttctacacatatcgaagttctgcaggagtatgtaaaagagaaacatctggatattggatttgcttatgacggagatgctgacagatgtatcgcagttgatgagaatggaaatgttgtagacggagaccgcattatgtatgtatgtggtaaatatctcatggagcagggaaaactgaaagacaatacagttgttacaacaattatgtctaacctgggactttataaagcatgcgataagattggtatgaagtatgagcagacagcagttggtgacaagtacgtttatgagaatatgcttaagaacggatatgttcttggtggagagcagtccggacacatcatcttcagcaagcatgcacgtacaggagatggtatcctgacatctcttatggttatggaagcgatcattgagaagaagcagacacttggaacacttgcagatgaagtgaagatcttcccacagcttctgaagaatgttcgtgtaaaggataagaagacagcactggataacgcagcagttcaggcggcagtagagaaaacagctgaagaactcggaacagacggacgtattcttgttcgcgagagtggaacagagccggtaatccgtgttatggtagaagcagcttctgacgagatctgtgagaagtatgtagacagcgtagtgaaagtgatcgaaagcgaaggactttgcgagtaaataattaagaatggaacagagttgttggataacagctatgaaaaggacatcctgcagaattaagtttctgcaggatgtccttttttaaaatcagtcgatatatttcagccatccttccggtgcttcgatacgtcccatctggatacctgtcagtgtatcgcgaagttttgcgattgtaggtcccatctgttccattccacttgggaagcagatctcttctccgtggttgacaatcttaccaaccggcgagatgacagcagctgttccgcacagaccacattcagcgaaatcttttacttcatcaaagtaaacatctctttcttctactttcagtccgagataatgttcagcaacatacatcagagaacgtcttgtgatagacggaagaattgttgtggagtgtggtgtaactacagtgttatcttttgttacgaacaggaagtttgctccacctgtttcctcaacttttgttcttgtagcggagtcaaggtacatattttcatcaaaaccatttgcgtgagctgtaacaattgcgtgaagactcattgcatagttcagtccggctttgatgtgtcctgttccatgcggtgcggcgcggtcaaagtctgatacgcacagtgtcagtggtttcacgccgcccttgaagtacggtccaaccggagtggcaaatacacggaactgatagtcagtagccggttttacaccaattacaggattgattccgaacatataaggtctgatataaagtgttgctcccgttccgtaaggtggaacgtaagcttcatttgcttttactgtctgaacaatagcatcaacgaatttatcttctgggaaaggcggcatctcaagacgtttcgctgagtcgaccatacgcttcgcattgaggtccggacggaaagtgacaatgtgtccatcctctgttgtgtaagccttcattccttcaaatactgtctgtgcatactgaagaactccggcacattcattcatgacgatgttaggatcttctgtgagaccaccttcatcccatgctccatctttataattagctacaaaacgcttatctgtagggatatatccgaatccgatattttcccagtcaatgttttttttctccattgtagtaaatcctccattcctttatgcggcgaaagaccgtatgatttctaattaacgctattataataccgtcaattgaaaaaatcaagagtgcgctctgttttttgaaaatgtttttacggacatgtaatagtcagaatctaaatcctgcaactaaatagttacaataactgtctgatatccggcacgcttcaaccggcgttccatttttacagcttcgtcaagcgtatcatattctccgaccgttacccggaataaaccatccccttctgtcaaaacagcaggaaaattcaattcagttaattcattcaggagtcgtcgggcatatcgttcactgcggaaagccccggtctgcactgcatagtgagggagagaagaagcattgctgatttctccgttttcttctaatgtatcaaggattccctcagcaatcgcaagcgcaatatcatcaaagttatcatcaaagagccggttatcagtgtcagagttgataaatccgacttctacaagaaccgccggcatctgtgtacggcgcagaacgaccagaccggggcgttcttttacgccgagattgatgaagccgagagcttccaggccttcattaatattttgagccattgtgtacttcagaccggatttgttgtaaaccagagattctacgccggatacggtattatctgtcggataagaattacggtgaatagacagaaagaagtctgcaccggctgcatttgcttccaatgctttctgatagggagattcataaatgtctgttgtacgtgtatagagtacatcaattccacgttcctgcagcagttctccgatagcaagcgttaaagataaggtgtcatccttttcccggcggccgttatagacagctccggggtcacgaccgccatgacctgcatcaagcatgatagaataagacatataatcacctcattattttgtgcttctatatattatatgaaagcgcgcattgcctgtgaaacgtcaaaaaatgccggctgcgataatgcagccgacatttcaaaaagttctattcatgtgagtgtttgtcagtttcagaaggatctgaattctcttcatccgcttcttcctctgtatctgctctttcaggaagataaacatgtaccgtttctacgcggttcttatccaacttctcgaccaccagacgaattccatcttcagtgacaacttcatcacccatctgaggtaaacggtccagatgttcgatgatcagtccaccgagagaatcataatcttcagagttaagttctgtatgtaagtgatcgttcacatcatcaagactcatggagccttcgataatatattcatgatcagaaatctctttgatcagttcatcttcattctcatcatattcatcatggatctcaccaacaatctcttccagaatatcttccaaagtgatgagtcctgccatctcaccgtactcatccagaacaattgcaatattaaaagtagaatctctcatctctacaagaagttcagagatatctttgaactcataagtgaaatgaggttttcttaagaaatcccggatattgaacggtgtatcatgatcgtaaagaagtagatccttcatgttaataataccgacaacattatcctgcgtctcttcgtaaacaggaagtcttgtgaatttgtcttcacggaaaatatcaattaattcatcgaaggtactattgacatcagcaaatgtaacatgtacgcgaggaaccataatgtctttcgccttggcatcgccgagatcgaatacgttgtagatcatctctttttcatcagactcgattacaccatcttcatggctgacatccacaatggtacgaagttcttcttctgtcatagctttattcgccgcatccggatctacgcgaaggatcagcatgattccgcgggaaaacaagttaatgatgaaaatgacaggagtcatgaccgtcatgaaaaacttgatgaccggaatatagcgaagggtaagcttctcagcgttgatcgttgcataattcttcggtgtaatctctccaaatacaaggattgccactgtcagaatcagtgtagcaatgctgaccatgtatccaccaaatgaataggcaagggttgtagcaagagaagatgctgaaacattcacaatgttattaccaatcaggatcgcactgagcatcttcgctgtgtgattctctgtgatatcaagagccaaagctgcccgcttgttcccaccgtctgcgagagagcggagtttaattttattcactgacatcagcgcagtctcggttgatgaaaaaaatgatgaaaacaatagtaaaattaacagtataattaataggtacgtgtcacctgcgtccactttaaatattcactcctttgattaaaaaatgtgcctccaaataggcttggttaattttagatatacgcattcattatacatggtttattagtgtttggcaaggcaatatactttactttatgaagtgggtggtgtatgatgttgatgactgataagaatatttaatactattatatagaagaaacggagtatagatatggaattgtacaatagattgtgcactattacaaaacaggaaaatgtaatgaaagatgagccgatgaagaaacatacaacatttcgtattggtggtccggcagattatttcgtgacacctgaatcaaaggaagagatccaggcaatcgttgagttatgcaaaaaagaggaaatcccatattccgtgatcggaaacggaagtaatcttcttgttggagataagggatatcgtggcgtaatccttcagatttttaagaaaatgaatcagatcagggtagaagagaataagatttatgccggagcaggcgcacttctgtcgaaggttgcggcaacagcactgtcagaatctctgacaggctttgagtttgcagcaggaattccgggaacattaggcggagccgttcgcatgaatgcaggtgcatacggtggagagatgaagcaggtacttgagagtgtggaagtgatgacagcagatggagaatttctcacgatcccggtagaagagatggggtttgcttatcggacaagtgtggtagaacagaagaattatattgttcttgaagcagtgatttctcttgaaaaaggaaatccggagaagatcaaagaagtgatggatgatctgaaagaaaaaagagtgacaaagcagccattagagtatgcaagtgcaggaagtacatttaagcgtccggaaggatatttcgcaggaaaactgattgaagatgcaggacttcgcggattcagggtcggagatgcacaggtctctgaaaagcattgcggtttcgtgatcaacagagggaatgcaagcgcagcagaggttatggaactgatgcgtcaggtagaagataaagtagaagaaaattcaggagtccgtctggaagcggaagtaagaagaataggagagttttgatatgcgttttgttatcgtaacagggatgtcaggagcgggaaaatcaacagcacttaagatgcttgaggatatgggatatttctgtgtggacaatctgccgatcgcaatgtttcctggatttgtgcagatgattgagaattcagaaacttcaatgaagaaagtggcattgggagtcgatgtgcgaagcggacaggatatttctggattagagaaagaccttgagcaaatggatgaaaagggaatcaaatatgagattctgtttctggacgcaaaggattctgtacttgtaaagcgatacaaagaaacgagaagacagcaccctctgagtgggtcgggacgtgtggataccggtattgcgaaagaacgtgagaagaccgcatttttgaaaatgaaggcaacgtatattcttgatacaagtaagatgctgacaagagaactgaagattgaacttgagaagatttttgtgaaaggagagagtttttgcaacctctatatcacagtaatgtcctttggttttaaatacggaattccgcaggacgcagaccttgtattcgatgtgcgttttcttccgaatccgtactatattgatacattgaaagaaaaaacaggaaatgatccggaagtccaggattatgtcatgcagaatgacaagggaccgattttccttgaaaaattaaaagacatggttgaatttctgattccaaattatattttggagggaaaaaaccagcttgtgatcgcaattggatgtaccggtgggaagcatagatctgtaacgctggcaaatgcgttatatcacacgcttgagacagaggaaagttatggcgtccgtattgaacatcgtgatattgggaaggatagtatcacaaagagaaagtaaaaggtggaaaatatgtcattttctggaaaagtgaaggaagagcttgcaaggaacatcagttcagccagacattgccagattgcggaattgacggcttttattggcatgtgcgggacggttgtaatcaatagttttgaccggtgcagtatcaagattcgtacagaaaacattttagttgcaagaaaggtctttacattaatagaaaaaacatttaatataaggagtgatatttccgttcggagaaatataaagaagcagacagagacctattctgttatcgtaaaaaagcatgaagatgcgatacgtatcttacaggctacgaagatgataggggaacagcaggagaatgcggaagagttgcatgccgtgaatccgatgattgtccaacaggtttgttgtcgaagagcatttctccgcggaacgtttcaggcgtccggatctatgagtgatccgaacaaggcatatcattttgagattgtctgttccacagaagagatggcacatcagatctgtgatctgatctgcagtttttctatggacgcaaagatcgtgctcagaaaaaagtcgtatgttgtttacctgaaagaaggagcacagatagtagatattctgaatatcatggaggcacatgtctcattaatggaacttgagaatgtaagaattctcaaggagatgagaaattctgtgaacagaaaagtgaattgtgaaactgccaatattaataagacagtatcagcagcagtgaaacagctggaagatattacatatttgagagatcagataggatttgagaatataccgaaaggattagtcgaggccgctcttgcccgcctcgagcatccggaagcaacattgaaggaactgggagaatccctgaatcctccggttggaaaatcgggtatcaaccacagactgcgtaagctgagtgagatggcagacaaagttcggcaagaacaaggaggattattatgattaagacatctgttgtagtgaaagcagacccagggtttgatggacggccgatcgcccttctcgtacaggaagccagccagtatgcgagcaaagtgtacattcaggtagccgagaagaacatcaatgccaagagtattatgggtatgatgagtctgaatctgatcggaggcgaggagattaccgttgtgacagacggtgaggacgagcagaaagcagctgaaggcattaagacattctttgctaatgtataataacaataagatggtaattgaagtcacagagagataaccatgtgattacaaatgaatatagaggggctgtactttgaagaggagtacagccatctttttctatgggggagagtttgcagctgatgtgaacacaaatgatttttgaataaggaggtatttgtttatgaaaagaatgctatttgtttacaatccgaattcaggaatgggacttctgaagccgaaactttcagatgtgatcgacacatttgtgaagggcggatatgaggtgacggtttatcctacacaaagaagtcaggatgctgtaagaaaagtcagtgagtacaaagaagaatatgatctcgtggcatgtagtggcggagatggtacattggatgaagtcgtgaccggtatgatgatgcgagaaaataagacgccgatcggatatattccggccggaacaacgaatgattttgcaagtagtctgcatatttccaagaatatgctggaggccgcagatacaattgtaacaggaacaccattttcctttgatatcggtcagtttaacgatgactacttcgtatatattgcagcctttggtattttcacagatgtgtcatatgagacgaagcagagtatgaagaatattcttggtcatatggcttatattctggaaggaaccaagagactgttcaatattccgtcttataagatcaaagtcacacatgacggagagacgattgaagatgagtttatctttggaatggtgacaaattcacgttctgtaggaggattcaaaagaatcacaggagaaaatgttatttttgatgatggcgtttttgaggtgacactctttaaaacaccaaagaatccagtcgagttgaacgaactgattggggcagttgtgatgcgtcagattaattcagacagaatatactccttcaagagtggtgaagtccgttttgaatctgttgaggcaattccatggactctggatggagagtacggcggtactcatgaagaagttgtgattcagaataagaatcaggcacttcagatcatggttaaggaagaagccgtagaagatctgagtgaacagttagtggaagcagatgaagtctgaacacataatctgaaatattttcagtgatattttagaaaatcaccccttttttgaattttaggtttattgaacaatcgcggaaaaccgcgtaaaatcaagaaaaaacggcagtttgaaatagaaataaaaattttttgaaaaaaatttaaaaaaggggttgcattttctgaaatcctggtatataataactattgtcttgtggcggtaacaaaaaagacacagacgaaaatgaataaggctccgtggtcaagcggtcaagacgctagcctctcacgctggaatcaggggttcgattcccctcggagtcactgaaagaagctcgtatttacgagctttttttgttttgaaaatcttttagtaaatcatggccaatcattttattagaaatattcctagcacaagtgatagtgtaatcttgctgtttttccagtattataaataaaaagtaatgttgataaaatggggaaaattgaagggaggattgcatatgggtcataaatcaaacgaaacaaaggaatttagaaataccataattgcatcacagggtgactacaaattaagaggcgacagtgatccatttacattcttttttgcttgtatacttattcctgtgggcgcactttttatattcattggtctttggtgtattaagaatctgtttgaaaaaaagaatgcgaggtgatcaaatgaatttttcctggggagattcaatattttttgcatttttgtgggcaagtgtgtgggccggagccctcacctgctatgttttggattggaaaattgaatggatgcagccaaaactgtggtttctttacgtcaagaaaaaattaaataaatcaaagtcgatctttttcaaagcaacgaagatttctcaaaaggtacttaacccttttgaaacagtattatctgcattagaagacggtaatattcaaaattcttcggtgaacataggtcagtcatatcgccagaaaatcgaacatgagatgaaacttttacaggcgaatgacataactcatgaaattcgtatagcttacgcgaaactgccagaagcaaacaaaaagaatcatgatttcaaacattggaatgatgccggacgtgaatggagagaggccatactgcaaggtaccgtatcaaaccgatatcgtaataaaaaaagtggaaaaatcatgtatgaggactttttcccacatggtgcaatcttacttagacaatccaggcatatccgtcatgatgaagttgaaagcaaaaacagaaatgaagagcaacaattttattctgaatatcagaaaatcatgtgtccaagctgtggcgctgagatttcattaaatagtaatgaagttcattgtccttattgtggtggatatatcaaaagcgatttcttcgactggcagatagaagagtttctgatctatcaggatttaaatcccaatgattataactataaaatggtagcagcaacactcctggttttctttcttccggcagttccttgttttcgatttatccaaagcgttgagatcatattggcagttccttttgtacttacagttatattagctgttattctcggagcagtgctactaagaagcaagaatagtacagaaggattagaagaacagatcgttcgttatgatgaaaaagtattacttgtagacctcaatgaagctcttaatgatgcagaactgacatctgatgcattattttacagtgtggacaaattacaactgaaagctgtagataatacggaaacccagacaacgatcacgatccaggcagtactccacaaacttattctcgaaaagaaccagaagattataaaacaggataaaaagatggaatcgaaattatacagagcacgccatccaagacgaatgaagtcaaaaggtcaggcagttttcagtgaaaaagaatgtccaagctgtggggctaatttcatgcctgataaaaatggttgttgttcctactgtggataccagcttactgttgataattcaaaatggagacttgttaatctttagcgagtgataaataatcgttggttatattgtacaaaaataaaaacaatccacagaagaaaaggaaagccattgtgaaaatgttaacaagattcaccgctgtggattgttttttatgcaaaacataagattgtcatttataaattaatacgctataatatagaagaattctaaataaataattcctgatgattttcacgggtgtcaggatctttaagaattggaggaaagaaatatgttagtatcagctacagaaatgcttcagaaagcaaaagcaggtcactacgcagtaggacagttcaacatcaacaatcttgagtggacaaaggctattcttacaacagcacaggaactcaactcaccagttatccttggtgtatctgagggtgcaggaaagtacatgacaggatataagactgttgtaggtatggtaaacggaatgatggaagaactcggaatcacagttccggttgctcttcatcttgaccacggcagctacgaaggatgcctgaaatgtgtagaagcaggattctcatcaatcatgtttgacggatctcattatccgatcgacgagaacgttgagaagacaaaagaactcgttaagattgctcacgagcacggaatgtcaatcgaggcagaggttggatccatcggtggagaagaagatggagttatcggaagaggtgagtgcgctgatccggaagagtgtaagagagtagctgatctgggaatcgatttcctggcagcaggtatcggtaacattcatggtaaatatccggcaaattgggaaggattaagctttgagactctggatgctattcagcagcgtacaggagcaatgccactcgtacttcacggtggtacaggtatcccggaagatatgatcaagaaagcaatctctcttggagttgctaagatcaacgttaatacagagtgtcagctttctttcgcagatgctacacgtaagtacatcgaagcaggaaaagatcttgagggtaaaggatttgacccacgtaaacttctcaaaccaggtgcagacgcaatcatggaaacagtaaaagagaagatggagttattcggatctgtcggaaaagcctgagaagaacttttttaaaaaagcacttgcgttttaaagcaagttgaggtatactgactcacgtagacagaacaagggcgttccaattataattggagtgccctttttttatcgcttgggaaatgatccgcatgattgaatcagattggatggaataaaatcagatctgatctgactggatcagacggatgatttcctgagaggtaatctattatgggggttcccgtagtgtaatcgaatattgttcattgcagtgaacggtaattgaagaattaagagaaaaggaaggtatagggtatgagcacagaattattcaatgtagctgacatctttggagaaaatgtatttaatgatacagttatgcaggagcgtctgccaaagaaagtttacaagaatctgagaaagacaattgaagaaggaaaagacctggatctcgagacagcagatgttattgctcacgagatgaaagaatgggcgattgaaaaaggagcgactcactatacacactggttcctgccacttacaggagttacagcagagaagcatgattcctttatctcagctccacttccgaacggaaaggttctgatgactttctcaggaaaggaattgatcaagggtgagccggatgcatcttcattcccgtcaggaggactgagagcaacattcgaggcaagaggatatacagcatgggattgtacatcaccagcattcgtaagacaggacgcaggcggagctacactttgcattccaacagcattctgctcctacacaggagaggcactggatcagaagacaccactgcttcgttctatggaagcaatcaacaaagaagcattaagacttcttcgtttatttggaaatacaacatctaagaaagttactccatctgttggagcagagcaggagtacttccttgtagatgcagagaagtttgaagaaagaaaagacctgatctacacaggacgtacactctttggagcaatgcctccgaaaggacaggagcttgatgatcattacttcggaacaatccgtcagagaatcgcatccttcatgagagatgtaaatattcagctttggaaagttggtgttccggctaagacacagcataatgaggttgcaccggcacagcacgaactggctccgatttatacagaggcgaacattgcggtagaccagaaccagctgacaatgcagacactgaagagagtagcctgccagcacggactgaaatgcctgcttcacgagaaaccgttcgcaggagttaacggatccggtaaacatgacaactggtccattacaacagatgacggaatcaaccttcttgatccaggtaagacacctcacgagaatacacagttccttcttgtacttgcctgcatcctgaaagcggttaacaagcatgcagacctgcttagagaatccgcagcagatccgggaaatgaccacagacttggagcaaacgaggcacctccggcaattatctctatcttccttggagaacagcttgaggatgttgttgagcagttgatcagtacaggagaagctacacacagtctgaaaggcggaaagctggagacaggtgtaagcacacttccggatttgttcaaagatgcaacagacagaaacagaacatcaccgttcgcatttacaggaaataagttcgagttccgtatggttggatcaagagattctatcgcaaacccgaatatcgtactgaacacaatcgttgcagaagcatttgcagatgcatgtgatattcttgagaaggcagatgactttgatcttgcagtacatgatctgatcaaagaatacctgacagagaaccagagaatcatcttcaacggaaacggatactctgacgagtgggttgcagaggctgagagaagaggacttccgaacattaagtctatggttgaagcaattccggcaatcacaacagacaaggctgtagaattgtttgagagattcagcgtatttacaaaagcagagcttgagtcccgtgcagagatccagtatgaggcatatgctaaggcaatcaatattgaagcccgtactatgatcgatatggcaagcaaacagttcctgccggcatttatcaagtatacaaagacacttgcagatacagtaaatgctgtaaaggcagctggtgttgacgcatctgttcagacagagactctgaaagaagtaagtgctctgatggctgagacaaaggcagcacttgataaccttgtaaaaacaacagcagatgcagcagcaaaagaagaaggcgaagtacaggctacatactatcatacagaggttgttccggctatggatgcactccgtgcaccggttgacaaacttgagatgatcgtggataaagaagcttggccaatgccatcttacggagacctgattttcgaggtataaaattgcattacagaaaagtaatttgaagtaaatgattggaagtcattattcggataaagagtctggataatggcttctttttgctctgaaaatcgggaaagctgcatgactatttcatgcaagaaagcaaaaattattgtataatgagaagtggttcgtgcagcttgagcgtattctgcacgaatgagaaaaagaaagagtggaataaaaatgcagtcagaagcagaacttagaagtttattatcaagaatagatcaccggggatatccggcttataaagatacaaaaggacagtaccgatttccgggatatgttttatcaatcgatcacgtacagggagatccgtttgcgtcaccgtcaaaggtaagtgtactggtgagtgggaagacagcaggattcccacaggaattatattgtggaaaatgtcagagaattgcacttcaggacgaattgctgcgccagtttggaagaagggcagaacggtttgcattcaaggcgaaaggttcaggtaagagtggtctgatctctgtcagcagatgcggacaggaagttctggagagaacagcgtgtcagattcagccggagaacggaaatatccttcttagaatggaaatcggatttccggcaaatggacgaacaatcaatgcgagagagttagagaagattttatttgattttgttccggagtgtgtaaaggcatccttgttttacaagaatctggatgcaaagagattgagaagaatcgtagatctggcagaagatcaggagtacatccgtaaagagcttccgaaacgtggtctgtgtgctttcgtggcaaacggaagtgtactgccaagggaatccggaatctcatcccggccgatgcgtgacggaatcgccttccagtctccgaaggaacaggaagtgacactggaacttccgcataaaggaaagattaccggtatgggaatccgtaaggggattaccttgatcgtcggcggaggttatcacggaaaatcaacacttttgaaagcattggaacttggagtgtacaatcacatcgcaggggatggaagagagtatgtgatcacagatgcgacagcagtgaaattgcgtgcggaggatggaagaagtatccagaagacagatatttccatgttcatcaacgatcttccgaacggaaaagatacgacatcattctgtacagaagatgcaagtggaagtacttcacaggcggcaaatgtgatcgaaggaattgaggcgggaacatctctgttcctgattgatgaagatacgagtgcaacgaactttatgatccgtgatgagctgatgcagcgcgtgatccacagagagatggaaccgatcacaccatttattgaaagaatcagggaattgtatgaaaattatgggatctcgacagtgatcgttgcaggaagttcgggagcttattttcatattgcggatagtattattcagatggatcgttatgttccgaaagacattacagtactggcgaaaaaagaagcagagaatttcccacagatcagcgtgccggagcagccggcagagaaaccgacttatgacagagtgccgcgaccggataaagcatttcgcggaaatgacaggatcaagatgaagatgatgggaaaagaatcagtgatgatcaacagggatacgatcgatctgagatacttagagcagattgcggatagcgaacaggtgacagcacttggatactgtgtacgatatgcacagaaacatttgattgacggaaagaagaatctaattcagattgtagatgagctggaagaagtgatgcagaataaatccctggcagcattgtgtgagagtacatccagtgtatcctgtatggcagtgccgagaagacaggaaatatttgcatgttttgacagatatagagcacttaggttagtatgacataggagttgataatatgaaattagagaatggaagaccagaaaacacagaaggaagattagaaaaggaaatcagggtatatgatttcctcgacaagcttggcgtggaataccaaagagttgatcacgaggcggcaatgacaatggaagcttgtgaagagatcgatagaacacttggagatggaactgcaatctgcaagaacctgttcctttgcaatcgacaggaaacagacttttatctgcttctgatgccgggtgacaagccattcaagacaaagaatctgtcggcacagataggttctgccagactttcctttgcaaagccggagtatatggagaagtatctggacattacaccgggatctgtcagcgttatgggacttatgaatgatacagaggggaaagtgcagcttctgatcgatgaggatgtaatgaaagatccgtattttggctgtcatccgtgtatcaatacatccagtctgaagattcgtacatcagatttgatcgcaaagatcattccggcgctgaagcatgcgccgaagatggtgaaacttccgggagcggaggagcaacagtagtaatgaaaatgtgattaatcgacaccaggtccatttcctgttggttgtatatttttcgtgcatttgctataatttatatgttgatatgcgaatagcaggtatcattttcaggattgatgcagagaagataaaaaggaggactagcgtgtctgaggaaaataaagtgatagatgaagtgaatacatcaggagtagtcgagcagccagtggatgcggaggagattccgccagtgaagacagaggcgataccaccggtgaatacggaaccaacacatcctgtacagccaccggtagaaccggcgcagaagctggaagattattacaaagagactgcggaggatcgtgcagctgaggaagagtacgagcaggtggttaaagatccgcagaaccggaaggaaaagatcgatcagatcaagagtattttccaccgcagtggggagaagaagttttccagagaagaagtgattctttctaagatccggccggaagatatgctggaatatctgacgttggaacagcgcagactggaatgcttacagaaagcaagacagagccggaatgagaagtttctcaaggtgcttcagcttgcagcgatacttgcagtaattgtggcagttgtcgctttactgaaggataatccggtcgttcttgtgaacattctgtatatgcttggtattgtagcagcaatctggatctggaagaatccgggaaagaagtaaatttactgtaatgaggtgacgatatgaaattttttcatttatcagacctgcatataggaaagcaattacatcactataacctccgggaggatcaggaacatatccttgcggaggttctttcatatgcagcgtccatacatccggatgcaattgttatcgcaggagacatttatgataaatccgtgccgtcggcagaagcagtcagcttgtttgatgaattcttgacagctctggctaagattgaaccggtgattccggttcttattatatcgggaaatcatgattcggcacagcggcttgattatgccagtcgtttgcttggaagccatcagatttatattgcgggccaggctccggaggaagaagaggatggtctgaaaaagattactttgacagatgagtttggtgaaacggatttctggctgcttccgtttttaaaaccgggatatgtacgcaagatctttggcggagaggtgccggagagttatacggcagctgtacaaggaattctggaacgggagaagattgatttttccagaagaaatgtactggtctcccatcagttttatacagggaagggggagactccaacaatatgtgaatcagaagtattatctgtcggaggcattgataatgtagatatttccgcagtgcaggagtttgattatgtggcacttggacatttacatggtgcacagagagtcggacaggagaagatccgctactgcggaacattgttgaaatattcagtcagcgaagcaaaccacaagaagacacttcatgtagttgaactgaaagaaaaagggagtgagccggaaatccagaagttgccgctgcatccacttcgtgatgtgagaaaacttaggggaacgctggaagagatccttgaagcggaggacggaaccgggagtgaagattatgtcagtgtaacgctgacagatgaggttgatccgtacaaaccgaaggaacagttggaaagaaagttccatcatattctagaagtgcggatggataatgagagaacaagacagaagctggaattttctgaagaacagatacggatcggtactccgtttgaaacattttgtgatttctacaaagagatgcaggggcaggaaatgtctgagcaggaacaaaagatcttaagagagattctaagtgaaatgaaaggggaagacgtatgagaccggtgagattgaagatgtccgcattcggatcttatgcgggcgtccaggagatagattttacaaagattcacagcggattatttctgattaccggagatacgggtgcaggaaaaacaaccatctttgatgcaatcatgtatgcgctgtatgaccggacgagtggcggacgcagagatggaaatatgatgcgcagccagtatgcatcagaagacacagacacttatgttgaatatgtgttttcttatcggggacaggaatataccgtgcgccgtaatccggaatatctccgggtagggaagagaagaaaagcagatggaagcctccggtatgtgaaagagacagcgaaggtaagtctccttcttccggatggaagggaatatcaggggaagaagcgagagacagaccagaagattcaagaaatcattggtcttgatgcgggacagtttacacagattgccatgatcgcgcagggagatttcttaaagcttcttcatgcagaatcaaaagaacgaaaaaagatattctcgcagatttttcagacacaaatctactggcaaatccaggaagcactgaaagaaaaaggaagagatctgtatattgcgctgaaggaaagtgaatcagacattcggcgtgagatggagcgtgtggaatcggaggacacagatcagcaggatctggcagaccagtggaaagaactctgtgagttatccatgccggaaggggaaaaggttctggaggctgtgaaaaactttctcgaatatgaagaaagttgtggaaaagtcttaaagaaagaatcagaggaacttaagaaacagtcagaaacacttcgaatgctgattcagaagaaagaagagaagaataagatatttgatcgtttggaaatggaagagaaacagctgagtattctgaatgcaaaaaaggaagagatggaaacctgtcgggttcaggcagtgcttggacaccgggcagagcaggcgagacatctggaagtgcaggctcttcgaacagcgaaatccgtgcggcagatacagggcgagatcgagcagatcactgtatggcagaaggaacaggaaaaggaactttctgaggttaaagaaaaagcggaagaattggaagaagtttttgcaaaggaagaaccggaaatgctgaaaagaatttcacagttatcggatcttcttccacattacgcaaatgtgcgtaagtatttgaaagaatatgaaaatcagacaggggcaatgcagcgatgtatacagaattgtcaggaagcatcagctcagtatgaggaagcatatgcgaaattctttcaggagcaggcgggaatcctggcaaaggaattacaggaaggtattccatgtccggtctgcggatcagtagaacatccgcatccggcaaagatttccggagaagcaccggataaagagacggtagagaaactgaagcaaagacgtgatctgctggaacaaaaaagaatacagcagcaggaaaagtttcagatatgtaaagcacagcttgaatcagaacaacgtattctcggagataatcctgtgaaagaagagcaggtaaaagaagagcttcagaagatgcaggttgaactggatcggaagaagaatgaaacaaagcaggcacaggaacagtgccgtaagatgacggaggaaagcagacgtcaggcaggaaaactggagggacttcgaggccaaaaggcagaacttgagaagcgttttgtaaaagagcaggaagagttccgagaggagatcagccgacaggaatttacttcacaggaagaattccgtgaggcgaaacagtggatcgaagggtggcgggagaaagacaaagaagtgaaagaacatgaccgccagctgttagagaaaaaggcaaagatcgagacgctgaaggaacagactgcaggcgaaaagcgggaagatccgcagcaggagatagaaaagcgaaatgaagtagaacatctgttgaaagaaaaacaggatcatcagatgcagcttcacagcagatggacaggtaaccagaatgcgtacaaaaatctgaaacaatatttttcttcgcaggaagctctgcgaaaagaatatgaggtactttccaacctgagcaagactgcaaatggcaatttgagcggcagtgtgaaacttgattttgagacgtatgtacagcggacttatttccggcagatcattcaggcggcaaaccgcaggctggcgcggatgacatcaaatgaatttattttacagtgcagggagattcaggatctgagcagtcagggacaggccggccttgatctggatgtctatgatctggtgacagattctgtcagagatgtgaagtctctttccggaggagaatccttcatggcagccttatcaatggcattgggacttgcagatattatccagaatacagccggagcagtgagtctggagacgatgtttgtagatgaaggattcggatctctggatgatgcatcaagagaccgtgcgattcagattctcaaagaacttgcaggagagaaaggactggttggaatcatttcccatgtaaatgaattgaaagagcagattgactggaaattaaatattacaaagacggagcatggaagtcaggcaaaatgggaaatctaaaagtataaggcaataatagggacagctacgaagaaagacagaatacaggcaggtgcggaaaatgaaacaaaatggaatgagagaaagaaaaggaaggatttcaagatacggaagaaggatgttggcagttctgctcagcgcagggatgctgctgacagagactcttccggtattcggaacagaaaatacggaggaaacggcacgcccacatcagctttattgcacagtacttggagacagtattgcgaaaggttacacttgcgataaatcctggatggagaattatggaagtctggcagcaaaggaaatagcatatagcgaagggtgcagatatatttatcacaattatgcaagaacaggtcttgatacagcaggattgaacgaaaagtatttgtcaaagcaggatgtgcagacaaatcttgcaaaagcagatgttatttttataacaattggttcgaatgacctgctcaacgaatgtaagcgtgtggttcaggaaatcctgaagacagatacaaaatttaaaagtgcggatgaggcacttgcatctttgaaagagtctgtaaagaagaatccgctgcttgtgctgagtgcgatcaacgcgttgaacaactgggattataattcctttgaaaaagaatggatccagatgatgaagacagtaaattcattgaaaaaggacgatgcaaaagtgatcgtgactacaatttataatccggcaggaaatatgaagcttccatctacgctgaataaaattgtagaagacattattgaaaatatgaacgcgatcattgaaaaacgtgcgggaaaatacgattatgaagttgcggatgtgtatcagtcatctgtgacatctcatctgcagaaagacggagtacatccggattttcaggggcagcagatcattgcagatctggtttgtaaggaatacgaaaagtaaaaaaggagcattctttgtgttggttcttatatggaacaatgcagagagtgctttgttctttttgtaagaaatagaactgtcacatttataacacaaaacattcacagaatcctgatacttttgaaaggtcaaaaatctcggtttgtctgcatagatatagactggaagaaatatagggaggtaagactttgatagaagtaaagaatcttgtgaagaagtatggaaatcatacagcagtagatcatttgaacttcacaatagaggaagggcatgtctacggctttcttggaccgaatggggcgggaaaatcaacaacgatgaatattatgacaggatacctcggtgctaccgaaggagaagtactgattaatggacatgatattctgaaagaacctgaggaggcgaaaaagcagattggttatctgccggaattgccaccgttatatatggagatgacagtccgtgaatatctggaatttgtagcggagttgaaaggaatcgctaagaataaaagagaagagtctatcaatgaagtagagaagatggtgaagatctgggaagtggaaaaccgtctgatcaggaatctgtcgaaaggataccgtcagagagtcggactggcacaggcagtgcttggatttccggagattattattcttgatgaaccaagtgtcggacttgatccaaaacagatcatagagatccgtgaactgatccgtcagcttgcgaagaaacatacggtgatcctgagttctcatattctggcggaagtccgtgaagtctgcgattatattttgattatttccaaaggaaaactggtcgcaagtgacacaccggagaacctggaacggaatctgggagattctgatctgattgagatcgagacgaaagcaagcccgggcgaagttcgaagaattcttgagacagtagatggaattcgaagtatttctacaaagtatctggaaaatggaatcacatgggctcagattcaggagaagaaaaatacagatatacgtgagaaagtatttcaggcatttgcacagaatcatcagccactgctgaaactgaatccgctgcaggtaagtcttgaagatgtctttgtggaactgacgcagagcgacagggcagcagaagaatatgcagaaaaggcgaagaagaaggaaacggaggacatgaaagatgctggcgatttataaaagagaagtacgctcctattttcagtctatggtgggatgcgtgtttgttgcatttcttattgcatttacaggaatctactttatggcatataacctgacagccggatatccatacttttcctatacgctttcaggtacactgatcgtatttatcgtagggattccgctgatcacgatgcgcagtttttcagaagagcgtaaaaataagacggatcagctgcttctgacagctccggtcagtctgtggaaggttgtgcttggaaaatatcttgcaatggtaacggtaattggaatcccgaatgtgatcttctgtgcgttcccattaatcattaaggcacagggaactgcatatctgaaagtagattacatatccatcggggtattcttcctgttgggttgtgtatatgcggcaatcggcatgttcctgtctgctctgacggaaagtcagatgatcgcatttatcagtacatttggtattctgcttatcttgtatctttggaatggaattctttccatgcttccaagcagtgcagtcagcggattggtcggtgtgcttatcattctgactctgattgttgtttatatttatcagatgacaggaaatatagtgattgccggtgtgatcgaagcagttggtgtgatcgccggtgtggttgtgtactttgtgaaatcaagtctttatgaaaacctgctgacaaagatgcttggaagactggcacttgcagatgtatttacggatatcacttcgaacagtattgtagatataacaggaatcgcgctgtatctttcactgatcgtagtctttgtgttcctgacagtacaggcaatccagaagagacgttggaattaggagggcatgaaagtggatagaagaaagaaaacaacaggaaagatcaaagggatgttccacacctccggtacaaagcacggatcttacagtgtggggctgacagtacttgtaatcgcgattgttattgtgttcaatctggtgatcggacagattccggaagcttatcgcaatctggatatgagcagtacaaagatttatgaaatttcagatacaacaaaggatctgctgagcggattgaatgataaagtcgatatgaaagttcttgcggtaaagaaagacacggatgacaggattaagacatttatcagtaaatatgcagcactttcagataagatcaatgttgagtggatcgatccggttctgcatccgtcagcattgacagagtataatgcatccgaaaatacaattgttgtatcttgtgaagcaacaggaaagacaacaactatttcttttgacaagattcttgttatggatacgtcttcctattattattcaggaaatgcatcttattcagaatttgacggagatggccagttgacaagtgcggtgaattatgtgacaagtgatgtgcagaagacaatctataaagtaagcggacatggagaggcggaactgtcatctacagttacagacttgatgagtaaaaacaattatacgctgacagaactgaatcttctaatggcagattccattccggatgattgtgatcttctgcttatgaatgcaccgacgaatgacctttcagaaaatgaagtgacacttctgacaaattatctggcagcaggtggaaaagtgatgtgtctgcttggggatacctctctgacggatttcccaaatctggcaagtgtgctgaaggtgtatggaattgaaggtgtagatggttatattgcggatccgacaagatgttatcagaaccagccatattatatcttcccacagctgaatgtatccggtgatcttgcgaacggaatcagttctcagatggtgcttttgacgaatgcacatggaatgacattgacagatccgacacgagatacgataacaacaagtgcattcatggagacatcggaaaatggatacgcagtaacagagtccgaacagaaacagggaacgtatgaacttggagttgtcgcaacagagacaatttcttcggaagatgattcttcttcgaatagttcagatgccgaggcaacagatacaacaactgatgatagtgaaagtacggaagattctgaggaaagcagtacaacagaagcccgtctgacggtgatctccgcaggaagtctgatcgatcagaatattacagatgcattttcacagcttgagaatacacagatctttatgaatgcagtaagtgcaaactttgacggagtacagaatctgtccatcgaggcaaagagccttggaacagagtataatacgatacagcatgccggtctgttcagccttcttgtaatctttggaatcccggcagtgattctgatcgtcggattcagcgtatggttcagaagaagaaaagcttaaggaggaagaaaattagaatgaagaaaaagaaagggccagtgattctgatcggtgttctggtgttgctccttatcctctattttgccttaagcacatggaataagaagcaggattccaaggaagaagaaacggtgaaagtgacagacctgaagacctcagagattaccggggtgaaatatgatcttggtacgggtgaaatgaattttgagaaagacggagatacctggtactataccgcagataaagattttccattgcgtcagagttatccgaagacagtggctgatgccatgggacagttgagtgcggatcgagaacttgaggatacggatgcgctggaagaatatggattagatcatccgacttatacagttacactgacagatgaagatggaactgtgacaacaatcaaggttgggaatgcgaccggaaatgattactatgcgacagtggacgatacggaaaaggtttatacaattccggcgacttcattggatgatatccagacagaactggatcagattactcagttggatacttatccaagtatcggaagtggaaatctgaaaaaagaagtgatcacacagaacggtgagacaacaacctatgattccgaaaatgagaatcaggcagaagatgttgcagcagtagccggaggacttggtgctgtgaagctgtcagaggcggcggattattctgtagatgatgcggatcttgcagggtatggtctggatgatacttccagaatcacagtagaagttacttatacaagcgatgatgaagatcagaccatgacgctttacatcggaggagaaaatggaagtggagacagatatgtcatgatgaatgattcaaggatcgtgtacctgatctcggatgaaatctgtaataatatattgaatcaataaagactggtaactgtttggagaaaacgaagaaaattcggtgcgtttcctttggacagttaccacattttatatttatttaattgacttttgagtgaaaacagcgcagaatatagcacatattatttttgtgaaaaacttaactcaagaaatgcatgacaagatactgttattgtaaagagtgatggaagattgcaggcggattaatttaagaaagaaggattagtgtgaaagaaaagtttttacgttttatgcagggaaggtatggattggatcagttctctaaggctctgcttattgggggactgatagtagtgctcttatcctcattttttgcaggaggaagggcaggatcattattctatttacttggatggatattgatcatttattgttatttccgtatattctccaaaaatgtatctaaacgatatgcggaaaatcagaagtatcttgcaaagacatacaagattaggacttatattcagcagcagaagaacagtctggcgcaaagaaaggtatatcatatttataaatgtccggggtgcaaacagaagattcgtattccgaaaggaaagggaaagattgagattcgctgtccgaaatgtggaacaacatttattaagaagagttgacaggtttactggagacgagcaatctgttatgatattcaagtgttgctggtcgcacatcgtgtgaacagtaactgtttgttagaataaaggcaagagaaagaacgaggaaataggaaggatgtcagatccatacagtatattaggtgtagacaggaatgctacggatgaagatgtgaagaaagcttatcgaaagctgagccgacagtatcatccggatgcgaatatcaataatccgaagaaagatgaggctgaggcgaagtttaaggaagtgcagcaggcttatcagcagattatggatgaacgcgaaaaaggatatacttccggatatggttcgagtgatggttcaggttatggaggttacgacccgtttggaggattcggcggttttggttcttatggatatggttcagcaggaagtacgggtagaacttccgggatgagtgaggaagatgcacatctgaatgcggcagctaattacatacgaagcggacattataaagaggctcttaacgtacttgacggaatcagtcagcatagtgcaagatggtatttctacagcgcatcggcgaattccggattaggaaataacgtgactgcattggaacatgcgagagaagcagttcgtctggaaccacagaatatgcagtatcagatgttacttcaacaactggaaggtggcggaaactggtatcagacaagacagacaatgtacggatatccgggaacctataatagtagctggtgtgtgaaactatgtattgccaatctgatgtgcaatatttgctgtaacagtggcggactgtgcctgggaggcggtccgggtggcggaacatttatgtaagaggaatagaagaggagaaccgagaatgttaacacagttttcgagaacagaactgcttttaggtaaggaagcaatgaacaggctggaaggcgcccgcgttgcagtatttggtatcggtggtgtcggtggatacgtgtgtgaagctcttgcaagaagcggagttggaaagctggatctgatcgataatgataaagtctgtatgagtaatctgaaccgacagattattgcaacgagaaagacggttggtcaatataaaacagaagtgatgaaggacaggattctcgatattaatccggaggcgaaagtgaacattcacaattgtttctttctgccggataatgcagatgaatttccttttgaagaatatgactatgttgtggatgcggtagatacagtgacagctaaaattgctttagttatgaagtgtaaagaattggatataccgatcatcagcagcatgggggcggggaataagcttgatgcaagtgcgtttcgtgtgacggatatttataagactaaggtatgcccacttgcgaaggtaatgcgacgagaattaaagaaacgcggtgttaagaaactgaaagttgtatattcagaagaagagccgatccgtccattggaagatacttcagataattgcaatgtggaggaaacttgtcaggaaaatctggaatacaaggctgcaaaacgcagatccactccgggcagtgtggcatttgtgccatcagtggcagggttgatcattgcaggtgaagtgattaaagatttggcaaaatgtgaatagaacgacaggggaagagagatgagtaagtcaaagaaagaattaagctttgcggaggaagtagagcagagtctgcgcaagaaattcaggaagaatatctggtgtaaatttacaaaggcaatcaatgaatatgaacttgtaaaaccgggagacaaaattgctgtctgcatttccggaggaaaagattctatgttgctggcaaagctttttcaagaactgaagcgtcataataagtttgattttgaggtgaagtttcttgtgatggatccggggtacagtccggttaaccgtcaggtgatagaggagaatgcaaagcggctggagattccgatagaggtttttgaatcagatattttcgaatcagtttttaatatagaaaagtcaccatgttatctctgtgcaagaatgcgtcgcggatatctgtatagtcatgcgcagaagatgggatgcaataagattgcattaggacatcattatgatgatgtgatcgagacgatcctcatggggatgctctattcagcgcaggtgcagacgatgatgccgaagctgcatagtacaaattttgaaggaatggaactgatccgaccgctatatatggttcgcgaagaagatatcaaagcatggagagattataatgatctgtattttcttcagtgtgcatgtaagtttacagaagcgtgcgctacaactgagaatgaagagaatctttctaagcgtaaagaaatcaaagaattgattgctacattgaaaaaagtaaatccatatgtggagggaaatattttcaagagtgttgaaaatgtaaatctggatactgtagttgcgtataagtcaaaaggtgagaagcatcatttccttgacacttacgatgagaagtcggaaggacaaggtgaatgatacggaactgcggatgtaaatgaagaagcagtggatataaaaaatgctaaattgaaaaattaagaaagaggcttgacttctgtttgcccccatgatacaatgtttgggcgaatggaagtaggctttttttttatgcctaaaaattgatggctcgcaaccatcagcaacacgtaggtgaatatattaaaagcgaggtggaagttgtgcgcacaagaattactctggaatgtacggaatgcaagaaccgtaactacaacatgacaaaggataagaagactcatccggaacgcatggaaaccaagaagtactgcagattctgcaaatcacacacactgcacaaagagacaaaataattgttgtcgaaaggaagtggaattatgggtgagaatacaaaaactcagaaaaagagctggttcaaaggacttaaggcagagttcaagaagatcgtttggccagacaagaatacacttgctaaacagaccacggcagttgttgctgtctccgtagtgcttggagcgctgatctcagtagttgatgcgcttttgagatatggaattgactttttagtgaaatagttgatcgcagcagaaaggtgattttatgtcagaggcaaaatggtacgtcgttcatacctattcagggtatgagaacaaagtaaaagcaaacattgacaagacaattgagactcgtcatctggaagaccagattttggaagttcgtgttccacttgaggaagtacctgagatacgtaatggagtggaaaaggtcgtacagagaaagatgtttcctggatatgttatgatccacatgatcatgaatgatgacacttggtatgttgtaagaaacacaagaggtgttacaggattcgtcggacctggatccaagccggtaccgcttgatgagagtgagatggagaaccttggaatcaaacaggatgaggtgatccttgatcttgagatcggtgatgttgtaactgtacttagcggtgcatgggaaggaacagttggagctgttcagacaatcaacgaacagaagaagagtctgacaatcaatgttgagctgtttggccgagaaactccggttgaacttggtttttcagaagtgaagaaaatggattaaaattgcgtgggagggatgagaatcccgccaataccacaaggaggtaattgaaatggcaaaaaaagtagaaggatatatcaaattacagattcctgctggaaaggcaactccggcaccaccggttggtcctgcacttggacagcacggtgtaaacatcgtagaatttacaaaacagttcaatgctagaacagcagatcagggagatcttatcatccctgtagtaatcactgtttacaatgacagaagcttcagcttcatcacaaagacaccaccggcagcagttcttattaagaaagcttgtaagattcagtccggttctggtgtaccgaacaagacaaaagttgctacaatcacaaaagctcaggttagagagatcgctgaaatgaagatgccagacctgaacgcagctacagtagaggctgctgagagcatgatcgctggaacatgccgttccatgggtgtagttgtagaagactaatccagattttataacgattatattgtaggatacaatcagccgaccttttccggtgtcctcgggggagagagcgctgagagttcaattgtttagtaaattcataaagtgggaggggcaagttcccgccaataccacaaggaggttattgtaaaatgaaacgaggaaaaaaatatatcgaagctgcaaaactgatcgaaagaggaaatctctatgatcctgcagaagcagtagcattagtaaagaaatcagcaacagcaaagtttgacgagacaatcgaggctcatatcagaacaggttgtgacggacgtcacgctgatcagcagatccgtggtgctgtagttcttccacacggaacaggtaagaaggttcgcatccttgtgttcgctaaggacgctaaggctgaggaagcaaaagcagcaggtgctgacttcgttggaggagacgaactgatcccgaagattcagaacgagggatggcttgacttcgacgttgtagttgctacaccggacatgatgggtgttgttggacgtcttggacgtgtactcggacctaagggacttatgccaaacccgaaggctggtacagtaacaatggacgttacaaaagctatcaacgatatcaaagctggtaagattgagtacagactggacaagacaaacattatccatgttccggttggaaaagcatcctttacagaggagcagttagcggacaacttccagacgcttatcgatgcaattaacaaggttagaccagccgctgttaaaggtcagtacctgaagagtgtaactcttacatctacaatgggacctggcgtaaaggttaacccggttaagcttgcataataaaatgtaaaagagacagttgcgagactgtcatagaggagggtctgctttcggcggatcctcttttgaaaaagaaaaaaagaaaaagatgaaaaataggcttgacatatggaaaataacatggtattatagcctagcaactgccgaagacagtaggtgctgaaaagcgtaagttatgaacgcctaccgaggaagaatgaatttttacatgcgtatgaatttgtagaacctccacgtctttggacctggagatttttttagtttcagcagagtgatctgctgggaactttggcagtacacgaataatataaggaggtgtaccgaaaagtggcaaaggttgaagtaaaacagccaatcgttgacaagattgcagaagagattaaagacgctcagtcagtagttctcgttgactaccgtggacttacagttgctcaggatacagagcttcgtaaacagcttagagaagctggtgtgatctacaaagtttacaagaacacaatgatgaagagagctttcgagggtactgaatttgcagcccttgatgactgcctggaaggaccaagcgctattgctatttctaaagatgacgcaacagcaccggcaagaatcctttacaaatttgcacaggatgctccggcacttgaacttaagggtggtgtagttgaaggaacagcatatgatgtagcaggtatttctgaacttgctaagatcccttcaagagacgaactgctttccaagttgcttggaagcttacagtcacctatcacaaactttgctcgtgttatcaaacagatcgcagagcagggtggagaagcggctccagcagaagcagcagaggagacagcaacagacgcagagtaatatgcgtcagctgatctggatacagacagcatatatgagcagatgctcatctaattaattaagaatgaaaagaaaaatggaggatatttaaaatggctaaattgacaacagctgaaatgatcgaagcgatcaaagagttatcagtattagagttaaacgagcttgttaaagcttgtgaagaagagttcggcgtatctgcagcagcaggcgttgtagttgcagcagcagctgagggtgcaggagcagcagagaaagatgagttcgacgtagagcttacatccgctggagcatctaaagtaaaagttatcaaggctgttcgtgagatcacaggtcttggacttaaagaagctaaagagcttgtagacggagctccgaaggtagttaaagaggcagtttctaaagcagaggctgaggaaatcaaaactaaacttgaagagcagggagcagaggttactcttaaataattttcctgaatataagtttattccgaccgcagaagatgatatgcttctgcggtctttttgcgaaagaggcgttagaaatggatgcagttgagttgacgagagagctgattaagaaagaaagtacggatccaggaagctgggaaaccgagattggtgaatatatctgcgactatttgaaagagagtggagcagatacagaggcttacgaagtagagccgggaagaaaaattgtaaaaggtgttgtgaaaggtgcgaaagcgcatccggcactggtatttatctgtcacatggatacggttgttaagggcgaaggatggacaaaaaatgcattcggcgcagaagtttcaaatgggaaaatctggggacgaggagcttgtgatatgaagtcaggacttgcaagtgcgttgacagcatttgcggaggtggcaaaatcacagaaagagaatgctgaggatatagaaaaacttccgggaacattagtctttatcggaacagtagacgaggaagcagatatgaaagggtcagaagcagcagtgcaacaaggatggattcagaaggaagactgggttcttgatatggaaccgacttccggaatgattcagatggctcacaaagggagaacctggtttgaacttaatgtggaaggtattactgcacatgcgagtatgccggagaagggggcagatgcaatcgccggaatcgcatttatgatcgcagagatccgaaaagcgatgggaaaagtaccgacacatgaagaacttggaaagtctacggttacatttggacagatttccggaggatacagtccatatgtagtatcagatcacagcatggtgacgatagatatgcgtcttgttccgccgatgaatacacaagaggcagaaaagattgttcgaaaagcaattgaaattggggaaaatgcagttccgggtgtaaagggttcttataagattacaggtgacagaccaccggtggagacacacatggagtcaggtcttatgaaagctttatctgaatcagtgaaaaaagttactggaaaagatccggttgtgtcagcgttcacgggttatacagacacagcagttgtggcaggtcttttgggaaatccgaattgtatgtcttatgggccgggaaatcttgcacaggctcataaaccggatgagtatgttgaaattgcggatattgagcggtgtgttcaggtttatcgtgagctgatctgtctttatgaagatatgatatagaagttatttctgaaaaaaagatactgttcaaaaggaaaaagcttagaatagcggaagatataacatatcttgagaaaaaagtcaagaaaaatataaaaaacacaagaatcatgttgacaataaaaagagctttgtgatatagtagaaaatgcgctattgtggaaaggtatgccatatagtgacagagaatactgtcgcaaggctcttttcatttttatataactggaactcgtaaaaggcagtttattgcctgcaaaaacaataaatgaggagtgaaacgtcaatggagaaaaacagaattcgtcccatcaaaaccggaaaaagcttccgcatgagctattccaggcagcaagaagtattggagatgcctaacctcattgaagttcagaaagattcctatcagtggtttcttgacaaaggactgaaagaggtattcgatgatatttccccgatcgcagattacaatggtcatctgagtctggaatttgtggattttacactctgcgaggaagatgcaaaatatacgattgatgagtgtaaagaacgtgatgcaacttatgcagcacctctgaaagtcagagtaaggctttataataaggagactgatgagattaacgagcatgagatctttatgggagatcttccgctgatgacaaagacaggtacttttgttatcaatggtgctgagcgtgttatcgtcagccagcttgtgcgttccccgggtatctattatggaatcgcacatgataagttcggtaagaaactttattcagcaactgttatcccgaaccgtggagcatggctggaatatgagactgattccaatgacgttttctatgtacgtgtagaccgtacaagaaaagtgccgatcacagttctgatccgtgcacttggagtaggtacaaatgcagagatcattgaactctttggtgaagagccaaaacttcttgcaagttttggaaaagatacttctgagaactaccaggaaggtctgttagagctctataagaagatccgtccgggcgagccgctggcagtagacagtgcagaaagcctgattacaagcatgttctttgatccaagacgttatgatcttgccaaagttggacgttataagtttaataagaagcttcttcttaagaaccgtgtatcaggacagatcctcgctgaggatgctgtaagtgcgatcacaggtgaagttgttgctgaaaagggaacaaagattactcgtgagatcgctgatatgatccagaatgcggcagtaccgtacatctgggtagagggtgaagagacttccagaaatatcaaggttctttccaatatgatggttgacctccaggctgttgttgatattgatccggccgaggttggcgtgacagagcaggtatattatccggttcttgcaggaatcattgaagaatctgcaggtgatgtagatgagatgaagagactgattaagagagatcttcatgatctgattccgaagcacatcacaaaagaagatatttttgcatctatcaactacaacatgcatcttgagtatggcatgggaaatgatgatgatatcgaccatctgggtaacagacgtatccgtgcggttggagaacttcttcagaatcagtacagaatcggtctgtccagactggaaagagttgttcgtgagagaatgacaacacaggatcaggatggtatttcaccacagtccctgatcaacattaagcctgtaacagcagcagtgaaggaattcttcggatcttcccagctgtcacagttcatggatcagaacaacccgcttggagagctgacacataagagacgtctctccgcacttggtcctggaggtctgtcaagagaccgtgcaggattcgaggtccgcgacgttcactattctcactatggaagaatgtgtcctatcgagactcctgaaggtcctaacatcggtctgatcaactccctcgcatgttatgcgagaatcaacgagtatggatttatcgaagcaccataccgtaaagttgacaagacagatccgatgaacccggttgttacagatgaagttgtatatatgactgctgatgaagaggataattaccatgtagcacaggcgaatacacctcttgatgaagaaggtcatttcattaataagaacgtatccggtcgttaccgtgaggaaacacaggactacgaaagaaataaattcgattacatggacgtatcacctaagatggtgttctccgtggctacagcgttgattccgttccttcagaacgatgatgccaaccgtgcgctgatgggatctaacatgcagcgtcaggcagtaccgcttcttacaacagaagctccggtagtcggaacaggtatggaagttaagacagctgttgactccggtgtggctgaagttgcagagcaggctggtgtggttgaaagctctacatctacaagcatcacgatcagacatgatgacggaacaaagaaaacatataaactgacaaaattccagagaagtaaccagagcaactgctacaaccagagaccaattgttgacaaaggtgaacgcgttgaggcaggacaggttatcgctgatggaccgtctacatccggtggagagatggctcttggtaagaacccactgatcggattcatgacatgggaaggttacaactacgaggatgctgttctcttaagtgagagactggttcaggatgatgtctacacatctgttcatattgaagaatatgaagcagaagcaagagatacaaagctcggaccagaagagatcacaagagacatcccaggtgttggtgatgatgcactgaaagatctggatgagagaggaatcatccgtatcggtgctgaggttcgtgccggagatatccttgtcggaaaagtaactccaaagggagagacagagctgactgctgaagagagactgcttcgtgcaatcttcggtgagaaagcacgtgaggtaagagatacatctctgaaagtacctcatggagaatatggtatcgtagtagatgccaaagtgtttacaagagaaaacggagatgagctgtcacctggagtaaatcaggcagttcgtatttacatcgctcagaagagaaagatctccgttggtgataagatggccggacgacatggaaacaagggtgttgtttcccgtgtacttccagtagaagatatgccattccttccgaatggacgtcctctggatatcgtgctgaacccactgggtgtgccttctcgtatgaacatcggacaggtgcttgagattcatctgagtcttgcagcaaaagcacttggattcaacgtatcaactcctgtattcgcaggtgcgaacgagaacgatattatggatacactggatctggcaaatgattatgtaaaccttgagtgggatgagttcgagaagaagcatggcgaagagcttcgtccggaagttctccagttcctgtctgagaacagagatcacagagaactctggaagggtgttccgctgtcaagagacggtaaagttcgtcttcgtgacggacgtacaggagagtacttcgacagcccggtaacaatcggacacatgcattatctgaaactgcatcatctggtagacgacaagatccatgctcgttctactggtccttactctctcgtaacacagcagccgctgggtggaaaagctcagttcggtggacagcgtttcggagagatggaggtatgggccctggaggcttatggtgcatcttatacactgcaggagatcctgacagtgaagtctgacgacgttgtaggacgtgtgaagacatatgaggcaattattaagggagagaatattcctgaaccaggagttcctgagtcatttaaggttcttcttaaagagctccagtcacttgctctggatgtccgtgtactgcgtgatgacaatacagaggttaagatcatggagagcgttgattacggtgagacagacctgcgtcatatcatcgaaggagacagaaagtatcgtgatgagaatgaatctttcggagagcatggattcacagagaaggagtttgtcggagaagaactggaagatgttgaaccggacgaagagccggacgacagcgatcttgagaacttaagttttgatgatgatgattacctgggtgaggaataataaggaggagccgtttttatgccaaataacaatgaacaacaatatgaaccgttaacatttgatgcgattaagatcggcctggcttcacctgaaaaaatcctggagtggtccagaggtgaggtaacaaagccggagaccatcaattacaggactttgaagccggagaaggacggacttttctgtgagagaatcttcggaccaagcaaagactgggagtgtcactgcggtaaatacaaaaagatccgttataagggcgttgtatgtgatcgctgtggtgttgaggtcacaaaggccagtgttcgtcgtgagcgtatgggacacatcgctctggcagcaccggtatcccatatctggtacttcaaaggaattccgagccgtatgggtctgatccttgatatttctccaagaacactggagagagtactttactttgcttcttacatcgtgcttgataagggagagacagatctctcttacaagcagatcctttcagaggcagagtatcaggaagcaaaggaaaaatggggaagacatgcattccgtgtaggtatgggtgctgaatccatcaaagagcttcttgagtctattgaccttgagaaagaatatgcagaacttcaggcaggcctggagaatgcaacaggacagaagcgtgcgagaattgtaaaacgtctggaagttgtagaagcattccgcgagtccggaaacagaccggagtggatgatccttacagctatcccggttatcccgccggatctgcgtcctatggtacagctggatggaggacgttttgcaacatctgacctgaatgatctgtacagaagaatcattaacagaaataaccgtctgagaagactccttgaactgggagcaccagatattatcgtaagaaacgagaagcgtatgcttcaggaagctgttgatgcgctgatcgataacggacgtcgtggacgtccggtaacaggacctggaaacagagcactcaagtctctgtctgacatgctgaaaggtaagtccggacgtttccgtcagaacctgcttggaaaacgtgttgactattcaggacgttctgttatcgtcgttggaccagaactgaagatctatcagtgtggtctgccgaaagagatggcaatcgagctgttcaagccattcgttatgaaagagcttgtagcgaacggaacagcacacaatatcaaaaatgcaaagaaaatggtcgagagacttcagccagaggtatgggatgtgcttgaagaagtaatcaaagagcatccggttatgctgaaccgtgcccctactctgcatagacttggtatccaggcatttgagccaatccttgtagaaggtaaggcaatcaagcttcatccactggtatgtacagcttacaatgccgatttcgatggagaccagatggctgtccatgtaccgctgtcacaggaagcacaggcagagtgccgtttccttcttctttcaccaaacaacttgctgaaaccatctgatggtggtccggtagccgttccttcacaggatatggtacttggtatttactatctgactcagcttcgtcctggtgcaaagggagagggcatgttctttaagagcgtgaacgaggctattcttgcatacgagaatggatatatcacacttcactcacagattaaagtacgtgtgacaaagactcttgcaaatggagaagagaagacaggaactatcgatgcaacacttggtcgtcttttgtttaacgagatcattccacaggatcttggttttgtagaccgtgaggttgagggaaatgaacttaagatggaaattgacttccatgttggtaagaaacagctgaagcagatccttgagaaagttatcaacactcatggagctacacagacagcagaagttcttgatgatgttaaggcaatcggatacaagttctctacaagagcagctatgacagtatctatttccgatatgactgtaccaccgcagaaaccgcagatgatgcaggaagcacaggatacagtagacaagatcacaaagaactataaacgtggtcttatcacagaggaagagcgttacaaagaagttgttgagacatggaaagcaactgatgataaactgacagaggcactgctgacaggtcttgataaatacaataacatcttcatgatggcagattccggagcccgtggatctgacaagcagatcaaacagcttgcaggtatgcgtggacttatggctgatacaacaggtcgtacgatcgagttgcctatcaagtcaaacttccgtgaaggtcttgacgtactggaatacttcatgtctgcccatggagctcgaaaaggaatggccgatacagctcttcgtacagccgattccggttacctgacaagacgtcttgtagacgtatctcaggagcttatcattcacgatgcagattgtgcaaaaccgggtcagccgattccgggaatgtatgtatctgcattcatggatggaaatgaagagattgagagccttcaggatcgtatcacaggaagatttgctgctgaggatcttaaagataaagacggaaacgtccttgtaaaagcaaaccatatgattacacctcgtcgtgcagagcgcgtgatgaagaaaggtgttgacgagaacggaaatcctcttgagcaggttaagatccgtacaattcttacatgtaaatgtaagaacggtgtatgctccaaatgttatggtgcgaacatggcaacaggtgaggcagttcaggttggtgaggcagtcggaatcatggccgctcagtcaatcggagaaccaggtacacagcttactatgcgtacattccataatggtggagttgccggtgacgatatcacacagggtcttcctcgtgtcgaggagcttttcgaggcaagaagacctaagggacttgccatcatcacagagatcgcaggacgtgcaacactcagtgatacaaagaagaaacgtgaggttatcgttacaaacgaagagacaggagaatccaaatcctaccttattccttacggatcacgtatcaaagtacaggacggcgttatgcttgaagccggagatgagcttacagaaggtagcgtaaatccacatgatatcctgaaaatcaaaggacttcgtgcaacacaggattatatgctccaggaagtacagcgtgtataccgtctccagggtgttgagatcaacgataagcatatcgaggttatcgttcgtcagatgctgaagaagatcagaatcgaagagaagggtgatacagagttcctgcctggaacaatggtagacgttcttgagttcgaagaagtaaacgagcagcttgttgcagaaggaaaagagccggctaccggagagcagatcatgcttggtatcacaaaggcttctctggcaacagaatccttcctgtcagccgcttccttccaggagacaacaaaggttctgacagaagcagctatcaagggtaaagttgaccatctggttggtctgaaagagaacgttatcatcggtaaacatattcctgccggaacaggtatgaagaagtaccgtgatgtaaaactcaacacagatattaagatggaagatgaactggatcttgaagatgacattgaattcgacgagaatggtgatctgacagatgaagttacagaagaagctattgtagacgaaaatgcagatgcagttgaggaaacagtaacagaaactgaagagtctacagaagaataagaaaaaaagcatatttaatatgctgacataaaaaaatatccccatggatgagaaatcgtctatggggatatttttatacaaataaagatttagtgtagagattctttttcgagtgcgggcgaaatccgatagcacttataaagtttattctaatagacagactttttcgtcgctatctgatttctactctctcgaaagaagaactctacttaagaagcagatgcactggatgttctgtagaatgatatccatctctcaaacgtgtttgtgtttaataaaatttaacgtagaagtctatctttttcaataaacagaaaatatgagcttgaagaagtttcatgttagaagagtgatacaggaatgaagacgaatgtggagcatgcttgctcatacttgaaaaacaatagattgcgttaaagaaaggattgacagctgtctgagtggcagcgagtttgtcaatcctttctttgcttttagcagtctgttgttttttctagtatgaacagtatgcgtaaccttgagtcggcgttcctgtatcattcttctaacaatcgactttctaaaataatattttctgttttcatccgtatatcagtaaaatgatttctaagctaaatttatatttagatagtctctccatttttatatttctgaagtacattctggatacgctcattcggactgagaatctcgctcagtgatccgtcatgattcagagtatcaatgatcagagcaatgtacttgctcatatcacagttgatataatatggttttgaaagaagatttggtgtctgatagatgaggtttgttgtcaggataccatcaataataccttcttcataagctttgtcaaacttctccattccgttagtaaacagaccaaaagtagcagcggcaaagatacgttttgctttacgtctctttaattctgtagcaacttcaatgatactgtctccggaagaaatcatatcatcaataataattacatctttgccctctacagagcttccaaggaactcatgagcaacgatagggttacgtccgtttacaatctgagtgtaatcacggcgtttgtagaacatacccatatccagaccaagaacgttggcaagatatacagcacggtttgtaccaccttcatccggactaatcgccatcatatgttcactgtcgatctgaagatcctttaccttgcgaagaagacctttgatgaactgataagttggtgagattgtctcaaatccactcagcggaatcgcatttgatacacgagggtcatgagcatcaaaagtgataatattgtcaactcccatacggacaagctcctgaagcgcaagtgcgcagtcaagagattcacgggaagttctcttatgctgacggctttcataaaggaatggcataataacgttaatacggcgtcccttaccacctacagcagcaatgattctctttaagttctggaaatggtcatccggtgacatatggtttgtgtttcctgtcagagagtaagtaacattataattacatacatcaaccatcaggtaaatatcttttcctcgtacggattctccaaggatacctttggcttcaccagaaccaaaacgcggtacgctggcattgatcagataattctctttctcatatccggagaaagcaacatcattcttgtgctcgtgagcgctttcgcggcgccatttaacaaggtaatcatttaccttatttccaagctcttcacagccaagtaaaggaatgattccaaggcttcctactggtatgttctccaagatacgttctgaacgacttaacatgagtcataatcctcctaatgttctaacttctttttaatacgtatatcatcaccgactattttcaacagactatatctgcttgtaattctggagaaagaacgctcagtataaagatcagcgagcgactccaaagaaaggtttgttgaaataatcgttgatttcctatgcagcagcctttcattgatgcaagtaaaaaactgtgatgcaataaaggcgtttgtgtactctgtaccaagatcatcaataataagcagatcacagtcaaaaatgtattcacacatgttatgtgcatcaatgtcatttttgtcaaatgcattcttggcaagagtattaaaaagctgtggagcagaaaaatacaaaacagaatattctctgttcataatctcttttgcgatacaggtggagagaaaggttttcccaacaccgacatctccatagaaaaagagattgttaaactctgtaccaaagctgtcgataaaatgatggcagatgcgcaaagtatcttccatcatggaacgagaagaacgtcccgttttcttatcgtaatgtgaaaccggataatagtcaagtctgaaattgctaaaatctgcttctacagggaattttttaatatttgactggtcataaagcaatccaatgatcgcttttttgaaacaatggcattttttattaccaatgtatccagtgtctttacaatccggacagtcgtaaaccggctccagataatcttctgggaagccggctgatttgagcagatgaatcttacgattacgtaattctgcaagatctttctttaaagcatcaactgcactggtatctccatcaagtagtttctttccatgctgaatagacagtgaggcaatggagtcatcaagtgttttgaattcagggagctttttatagacttcttcataccgggccatctgaatgtcatggctatgtaattgtttctgctcatatttacgcatgattgcatggtactgtgaattttttaatcccatgtaaagactccttttaaattctcttaaatataattgatcttctaaactattgttttttcattagttgctctttaaaagctgctcttccagagaatccatgtcgtaggaacgtctctcaaaattattcagatttcttgtgacattctttggttttgtggcaggacttctatgtaaggaacgttctttctggaattcatgatccaaggcattgatatcagtcagatgatgaatattgcattcataccattttgtgagaatggagtcagcatattcaaaacttggctgatgtgtggcagagattgttctgcggcaggcttcctgaatgatgtcagcggaaaatccataagtatcagcccatttattaatatattccagttcggaagaggcaggtcctctgttcttaatgccgaatgcattcaaaaccgtgtagcagttacggctgtatgcagcagcctgttcttttgcctgtgatatagtttcaactccgttctctacccaggaaatggcaactttctggatataatgcatactcttatgtccgttctctacacaggattcaatcagatattcaatcaaatcagcagacatatgcagcgtatcatagaagtaagtaattgtgtcgacatccgtatgcgtcagtgtcttgccaaggtactgttctgtgataaacaggagagacttgatctccttctgggcacggaatgtatcaagaggaaccgcattggaaacaggagtctggatactgctttctaccggtgcagaaacagcttctgagcggaactctgttaccggagctaccggagcctgagttggaattgaatcctgtggatagcctgatgcacagccggaaaaatcagttgtatctccataagtattctcttcttcatcgcgaagaaattcaacggcagtgattccaccgtccggtccgtgtccaagtctgagaagaccgacagattcccagtaacggaaagcgcgaagaacatcattctctgtattattcagataatctgcgatcatggagatgctcagagaagatgcagcatcctcaacatggcggagaagaaaaaggtatacttttacaaactctccgttcgcattcgccatataatgatctacaaagctgttcggcagcattgtcatattcatctgaaaattattctttaaaaccaaagtcttcataacttatcctgctttctctatgtattaaccaattgccacttgctctgtctgatgaggggcaacctgaaatctatatcttcttctctttagtgtgaatattataacatcatatgagaatcttaaaaagaattttcgagtgggtaactaggacttttttgtagataactatgtggagaaaatgtggataaagtgtggaaaagttcacatgcatgtggatatctatgtaaacttttccacagaatagtttagcaaagttattgagaaagccttattttaaaatgtcttcgccgattttgacaacatctccggctcccattgtgatcaggagatctccggatttgcagttttctttaaggaaagcttctatttcttcaaaacttggaaggtaatgtgcatctgttccaagtttacgtgcttcctctgcaagaccggcagaagaaactccgagagtatctgtctcacgagctgcatagatatctgcaagcaccagatgatccgtgtgagaaagagcttctgcaaattcatggaagaaagcctttgttctcgtataagtatgtggttggaagacacaccatacctgattgtgtgggtaatgctgtgcagccttcagagtagcggcaatctctgtcggatgatgtgcataatcatcgacaacagttacaccgttaaatgttcccttgtattcgaaacgacggtctgttccactgaaagaaagaattccttttttaattgtttccattggaatctgaagcagttcagcagtagcaatagatgcaagtgcatttgatacattatgatcacctgttacagaaagctggatatggtcaaccacttttccgttctttataagatcaaatgcaacaagccctttttcatcataagtgatgttagaagcactgtagtcaagcatatcagaagaaccataagtgatcacattgcagtcaagactatcataaatctcctgataattgtcgatatcaccattgatgatcaaagttccatcagaaggaagaagtgctgcaaactgatggaaagaatgtctgatgtcttcaagatccttgaagaagtccagatgatcttcctcaatattgaggatgacactgatcttcggataaaaatgaaggaaactgtttgtatactcacaggcttctgtgataaaagtctcggattttccaacgcggatgttaccaccgattgccttgagaataccgccgacagaaattgtaggatccagatcggctgcaagtaaaatatgggagatcatggatgtagtagtagtttttccatgagtaccggatacagcgattggtgtcttgtaatttttcatcagctgtccaagcagctctgcgcgtgtaagcattggaatcttgcgggcaacagcttccataagctctggattagctttattgatcgcagcagtgtatacaacacagtcaattccgtcagaaatgttctcggcacactgtccgtaatggatgatggcaccttcagactccagcttctttgtaagcggagactcctttgaatctgaaccggatacagtaaatccttcttccagaagaatctcagcaagaccgctcatactgattccgccaattccaataaaatgaatatgtatcggcttttcaaaattgattttatacattgagatacgccctttctttaatagattttataaaataacttgtgattttagtcataaatcttctatatcgtttatattatactatatatcgaaaaaaaagaaagaagatctttttggtagaaattgataaaaaggagaaaaaagtatgaaaaaaattgtaaaatatgtttgttatttctaaatatatggtataatgattctagcttacttgaaatgaggtgacgtaatgtataagaaggaaatgattgccatgctgctggcgggtggacagggcagtcgacttggagtacttacatcaaaagttgcaaaaccagcagttgcttttggtggaaagtaccgtattattgatttcccgcttagcaactgtattaactcgggaatcgatacggttggtgtactgacacagtatcagccgcttcgcctgaatacacatattggaattggaattccgtgggatttggatcgcaacgttggaggtgtatcagttctcccaccatatgagaagagtacaaacagtgagtggtatacaggaacagcgaatgccatttatcagaatctgaattacatagagacttataatccggactatgtactgattctttcaggagatcatatttataagatggattatgaagtgatgcttgatttccacaaggcaaacaatgctgatgtgacaattgcagcaatgccggtgccgatggaagaagcaagccgtttcggaattgtagtgacagatcaggacagcaggatcaaagaattcgaagagaagcctgagaagccaagcagtaatctggcatcgatgggaatctatatcttcagctggccggttcttaaagaggcactcatcaagctgaaagaccagccaaactgtgatttcggaaaacatattattccatattgtcatgaaaaaggggacaggctgtttgcatatgagtacaacggatactggaaagatgttggaacactcagctcttattgggaagcgaatatggaactgatcgatatcattccggagtttaatctttatgaagaattctggaagatctatacgaacagtgcgaatattcctccacagtatattgcagagaatgctgttgtagacaaatgtatcattgcaaacggaacagaaatctacggagaagtccacagttctgttcttggaggaagtgttactgtaggaaagggcagcgtagtccgtgactcaattattatgcagggagttacgatcggagaaaactgcgtgatcgagaaagcaatcatagcagaagacacggtaattggaaatgatgtttctatcggaatcggaagtgaagtcccgaataagatgaaaccgaatatttacagcggtggactggctacgatcggagagaattcagtgattccgggaggagtacagattggaaagaataccgccatcagtggagtgacatcatccgaggattacatagatggagtacttgcaagcggtgagacattgataaaggcaggtgacagagtatgagagcagtaggaattattttagccggtggtaacagcagaaagatgaaagagctgacttcaagacgtgcggcagcagcaatgccggttgccggaagctatcgcgcaattgactttacattaagtaatatgacaaactctcatatccagaaagttgctgtgctgacacagtacaatgcccgttctttgaatgagcatctgaattcctccaaatggtgggatttcggaagaaaacagggtggattatatgtatttacacctacgatcacagatgataatggttactggtacagaggaacagcagatgcgatttatcagaatctggatttcctgagaagatgtcatgaaccttatgtaatcattacatcaggtgatgcagtctataagatggattataataaagtgctggaatatcatattgcgaagaaagcagatatcactgttgtttgtaaagaacttggagcaggagaagatgcgacaagattcggaaccgttaagatgaatgaatcttgcagaatcgaagaatttgaagaaaaaccgatgattgcaagatcacagacaatctctacaggaatttatgtgatccgcagaagactgctgatcgatcttgtagaacaatgtgcggaagaagagagacatgatttcgtaaatgatatcctgatccgttataagaatgtaaagaagatttatggttataagattgaaagctattggaataatatttcaacagtagatgcatattacaagacgaatatggatttcctgaaaccggaagtgagaaaatatttcttcaaggatctgccaagtgtatattctaaggtgagtgatcagccaccggcaaaatataatccgggtgcgatcgtgaagaacagtctggttggaagtggaagtattattaatggaacgatagagaactcagttattttcaagaaagtatttgttggaaataattgcgtgatcaagaactctatcatattgaatgatgtatatcttggagataatacatacattgagaactgtattgtagagagcagggatacgatccgtgcgaatacaagacatgtaggggaagacggaattaaaatagttattgaaaagaatgaaagatatgcattataagccaagataagcacaaaaaccctgaaaaagggtgttcatattccgtgataatgcaaaagagaaaggggaactgtaatatgcagattacagatgtacgtgtacgtaaagttgcgaaagagggaaagttaaaagcagtagtatctatcacaattgatgaggagtttgttgttcatgatatcaaagtgatcgaaggtgaaaaggggcttttcattgcaatgccaagtaaaaaagcattagatggtgagtatcgtgatatcgcacatccgatcaattcaggaacaagagaacgaattcagtcaacaattcttgcaagatatcagcaggcacttgaagaagagccggagccgttggttgttgacgagatgtagggtattgtggtgctgctcttatttggataaatgacaggtaaaggcagggctaatacaatagataggaaacaggcgaaaggaaaagtgcagtgattgtccgatcactgcacttttcctttttgtcttataaatgaaaaaccattttttcaccggttgtcggatgtgtgaattccagtcgacaagcacaaagcattaactgtcgtgaagtgcatgcggcagtgccatattttcgatccccgatcagagggtgtccggcatgtgcaaactgcacgcggatctgatgatgacgcccggtatccagatgaatttccagttgggaaaaaggttcaccagaaggaagtgtacctgtatggattactttataatgaagtcgtgcatactttgcatcaggcacattttcttcacagacacgggaggtgttggctcgtccgtcttttacaagatagtcttccagagttccttcgctgtgttcgaaaatgcctaaagcctgtgcacggtaatatttcccaaaaccagatgtggtaagctggcgggaaagttcctttgcggcagcaggtgtttttgcaaaaacaagaagtccttctaccggttggtccagccgatggatgacagcaagataaggttcgcgtgaagaggtttttttagcagtattttttatcagatgattttttaaaatactgaccatatcttttgtgccaatgcggctgctctgggtaggaactccagcaggtttatgacagacgataatatccttgtcctcatatattatttcaggggtaagtgatgaaatcatagttgtatccttctttcttgacaatcgctaaagttgcgtctaaactgagaattaataatgttataatgatacatgatgcaaacgaatcaggtcaagcttttaaggagaacatcaatgaataatgactgggaacattttggagaagagataaagcagacaatacaggatgcaattgatacaaaggattacagcagattgaaccagatggtgtctgatacggtgaaccatgcgatggactgcgtctcggcagggattaaaaatggtggctggtacagagatccgaagaccggacagccattatatggaaataaaaagaataccggaagcagatcaggtgcagaaaaccaggggtatcgtccgaatcaagaatcgaagatgtcggaaatgagaaattatagtcagaatcgtccggtaccggtgactccaagatatctcaaaggaacttcggtaaagatcggcgggacttttctagcagcgacaggagctgtatttggattgacttctgttattttccttatcatcactttgattggaagtgtgatcacagcgtttgatgtagtcagtggtctgatcattggaatttttgcagttgcttttatatcttttgcagtgatgacttatgtaggagtagatatggtacgtacggtgggaaggtttcgccaatatgtatctgttctgagagaccgggaattttgtgatattaaggaaattgcttctgcgacaggacgagatgtcagaaaggttctgaaagatgtgaaaaaaatgattacaaaaggctggttctgtcagggacatctggatgagaaagaatcctgcctgatggtcagtgaacatgcatggaatcagtatacagctcttatggaagacatgaaacagcgcaaggcagaggagcaggctgctcagaaaaagatgcaggaagagtatgacagactttcaccggaagtacagaagatcgtacaggcaggagatgaatatgtgagaaagattaaggcagcgaatgacgcaattccgggagaagtgatttcggcaaagatttcccgcatggaactgctcgtggatcgtatttttgaccgcgtggagcagaatccggattctgtgaatgatatgcgaagaatgatggattattatcttccgacaacgatgaaacttcttgaagcgtatgaagagctggatgcccagccagtacagggagaaaatatcatttcttccaagaaagagattgaagatacgatagatacattgaatattgcatttgagaaattactggacagcctgttccaggatacagcatgggatgtatcttcagatatttcagtacttcatacaatgcttgcgcaggaaggtctgacagaagacgggctgaagaaataatgatatcccaaacagacaatgaatcaaaacagttacaaacagaaatggaggattactatgagtgatgcattcaaggatgtaagtacagtgccgacactgacactggaaccgtttcaagcggaagaagaaaagaaaccggcggtgcagccggaagaaccgaagctggatgatacgatcctgacagaagaagagcgcaggatggtagatgcatttgcacagcagatcgatctgacgaattcttctatgattcttcagtatggcgcaggtacacagaaaaagatggcagatttctcagaaagtgctttggaaaatgtgaagtcaaaggatctgggagaagttggtacactgcttacgaatgttgtaactgaactgaagagctttgatgaagaagagagcaaaggatttcttggaatatttaagaaagcatcgaataaagttgaatctatgaaagcaaagtattcgaaagccgaagaaaatgtgaatcagatcgtgaaagcattggacaaccatcaggtgcagcttttaaaagatgttgcgatactcgataagatgtatgatctgaatcttacttattttaaagagctttctatgtacattcttgcaggaaagaaaaaactggaagaagtaagaagcacacagcttgctgaattgatgagcaaagctcagataagcggcctcccggaagatgcgcaggcagcaaaagatctggattcgatgtgcaaccgttttgaaaagaagttacatgatcttgaactgacgagaatgatctccatccagaccgcaccacagatccgactggttcagaataatgatacacagatggtagagaagatccagtctacaatcgtgaatacgattccgttgtggaagagtcagatgcttctcgcacttggagtagaacattcttcacaggcggcggcagcacagagacaggtgacggatatgacaaatgaactgttgaagaagaatgcggagacattaaaaatgtccacaattgagactgcaaaagagtctgaaagaggaattgcagatctcgagacattaaaagcaacaaatgaatcactgatctctacattggatgaagtgatgaacattcagagagaaggaagagaaaaacgccgggaagcggaggcggaacttcgcaatatggaaaatgaattgaaagcaaagcttctggaaatcagaggataaagctttttggcttgacagcgggtgttttatcagttagaatttcatttgataactgacgttgaacgggaatagtagatacgcagcatgcttcagagagaaggcggcaggtgagagcctttgcattacggtatggaaccggcccgggagtccctgtatgaaagtacagcgtaggtcctgcgttaaaggagaagaaagtgaatgcagatacagagatcaatttgtgttggttttgattatagaatggatgtattgcattaattagggtggtaccgccggagatattcggtccctatcgtggggatgcgatatcccggcgtttttttatattaaagtaaaagcaaactgctgtcaggggacagcaatgcaaaaaaacaaaaaggagaagaacaatggcaaagaaattagtacagaatatcactgccagagaagaagattttgctcagtggtatacagacgttgtgcgtgaagcaaaactgtgtgattattcaggtgttaaaggatgtatgaactaccttccgaacggatatgctctgtgggagaatattcagaagaacctggatgcacgtttcaaagagacaggagtagagaatgtataccttccggttatgatcccggaaagccttcttcagaaagaaaaggatcatatcgaaggatttgcaccggaagttgcatgggtaacacatggtggactggaagaacttcaggaaagattctgtatccgtcctacatctgagacactgttctgtgatgtctggagcaagacagttcagtcttaccgtgatcttcctaaggtgtggaatcagtggtgttccgttcttcgttgggagaagacaacaagaccattccttcgttccagagagttcctgtggcaggaaggacatacaatccatgcaacatacgaagaagcagaagagcgtacaaaacagatgtggagagtctacagagactttgcacaggatgttcttgcaatcccggtagtttccggacgtaagacagagagtgagaaattcgcaggagcacaggatacttatacaatcgaagcgctgatgcatgacggaaaagcactccagtcagcaacaagccacttcttcggaagttccttcccaagtgcatttggtattcagtattcagataagaataacgaacttcatgaagtatacgagacatcctggggactgtctacaagaattatcggtgcgctgatcatggtacacggagatgacagtggacttgttattccaccgagaatcgcaccggtgcagacaatgattattccgatcgctcagcataaagaaggtgttcttgataaggcaaatgaacttgttgatacactgaaggcagcaggatacaaagtgaaaatcgacgattctgacaaagcacctggatggaagttcagcggacaggagatccttggaatcccgacacgtatcgagatcggaccgaaagacatcgagaacaatcaggcagttatcgtacgccgtgatacaagagagaagatcgttgtttctctggatgagcttacaacaaaacttgctgaagttcttgagacaatgcagaatgatatgttcgaaagagcaaaagcattccttgattctcatatcaatgaagcaacaacaatggatgagatgaatgagaagttcaatgagaaccttggattcatcaaagcaatgtggtgtggagacgaagcctgtgaagatgagatcaaagctcagacaggcggagctacatctagatgtattccggaagaggaagaacatctttcagatgtatgtgtatgctgcggaaaaccggcgaagcatatggtatactggggcaaagcgtactaatttatttcgttgaaaataaagaagagatttactttcatagttgctagaaaaaagaatttgatttaataacaaataacagatggtttcttaagaaaaaaagagagtgccatctgttatttttgtatgaaaaataatatggaaaatgcgaaaaaagccttgactttcggcgctaaacgtaataaactaaacgagcgtgtggaaaaaggcaatgtctttttgatgcgcaaataaggataatgacttaattatccgcagccccttgaggcataagcccaaggtaacgaataattcataggaggtgaaaagaatgccaacatttaaccagttagttagaaaaggacgtcagacttctgagaagaaatctacagcaccggcacttcagaaaggatacaactccctgaagaaacgtgcaactgatgtttctgcaccacagaagagaggtgtatgtacagcagttaagacagctacacctaagaagcctaactcagctctgagaaagatcgccagagttcgtctgtcaaacggaatcgaagtaacaagctacattccaggtgaaggacacaaccttcaggagcatagcgttgttatgatccgtggaggaagagttaaggacctgccaggtacaagataccacattatccgtggaacacttgatacagcaggtgttgctaagagaagacaggctcgttctaagtacggtgctaagagaccgaaagacgctaaataagaagtcgcggattgcagtatagtattttagataagtgtaactaatagttaaatcgtatcacaaacagaactatgattagtcgtaggttgcggatgctatatagatttcgcggctgcgagcacatggaatgtgatctcatagaaagacacatgtgagtaccgatgaattaatcccggaaaaaccggaaaatatgattaaggagggaaggaccgtgccacgtaaaggacatactcagaagagagatgtattagcggatccaatatacaacaataaagttgttaccaaacttatcaacaacatcatgcttgatggtaagaaaggcgtagcacagaagattgtatacggagcatttgaaagagtagaagctaaggctgagaagccggctattgaagtgtttgaagaggctatgaacaacatgatgccagttcttgaagttaaagcaagacgtatcggtggagcaacataccaggtaccgatcgaggttagagctgacagaagacaggcactcgcacttcgctggttaactatgtattcacgtcagagaggcgagaagacacaggaagaaagactggcaaacgagattcttgatgcagctaacaacacaggtggagctgtaaagagaaaagaagatatgcacaagatggcagaagcaaacaaggcgtttgctcactatcgtttctaattattttaggaggaaaaaatcttggctggaagagaatatccattagagagaaccagaaatatcggtattatggctcatattgatgctggtaagactacactgacagagcgtattctttactataccggtgttaactataagattggtgatactcatgaaggtactgcaacaatggactggatggaacaggagcaggaaagaggtatcacaattacttcagccgctacaacatgtcactggacattggaagagaagacaaaagtgaaaccgggcgctttagagcatcgtatcaatatcattgatactccgggacacgttgacttcactgtagaggttgagcgttcactccgtgtacttgatggagctgtcggcgtattctgtgctaagggtggtgttgagccgcagtcagaaaacgtatggcgtcaggcagacacatacaatgtaccacgtatggcattcatcaataagatggacatccttggtgctgatttctacaatgctgtagatcagatcaagacaagacttggaaagaacgctatttgtcttcagcttccaatcggaaaagaagacgaattcaaaggaatcatcgatctgttcgagatgcaggcctacatctacaatgatgagaagggtgaagacatcactgtaacagatattccggaagagatgcaggatgaagctgagctttatcacacagaactcgtagagaaaatctgtgagctggacgatgaccttatgatggaataccttgagggtgaagaaccttctatcgatgcaatgaaagcagttctgagaaaagctacatgtgagtgtacagctgttccggtatgctgcggtactgcatacagaaacaaaggtgttcagaaactccttgatgcaatcatcgagtttatgccggctccaacagacatcccggcaatcgagggtgttgatgaagacggaaacgaagtagtaagacactcttctgatgaagagccgttctctgctctcgtatttaagatcatgacagacccattcgtaggtaagcttgcttacttccgtgtgtattcaggtgttatgaactccggttcttatgtactgaatgctactaaaaataaaaaagagcgtgttggacgtatccttcagatgcatgccaacaagcgtgaagagctggataaagtatattcaggagatattgctgcagcaatcggattcaagttctcaacaacaggagatacaatttgtgacgagcagcatccagtaattcttgagtccatggaattcccagagccagttatcgagcttgctatcgagcctaagacaaaggcttcacagggaaaacttggagagtctcttgcaaaacttgcagaagaagacccgacattccgtgctcatacagataaagaaactggacagacaatcatcgctggtatgggtgagcttcatcttgaaatcatcgttgacagacttcttcgtgagttcaaggtagaggctaacgtaggtgcacctcaggttgcttacaaagagtccatcacaaagccagttgatattgacagcaagtatgcgaaacagtctggtggacgtggacagtacggacactgtaaagttaaattcgagccaatggatgtcaacggtgaggagacatacaagttcgagtctactgtagttggaggagctattccgaaggaatacatcccggcagtaggtgaaggtattgaagaagctatgaagtctggtatccttggaggattccctgtagttggtgtttacgctaacgtatacgacggatcttaccatgaagtcgattccagtgagatggcattccacatcgctggttcccttgcattcaaggatgctatgaaacagggcgcacctgtacttcttgagcctatcatgaaggtagaggttacaatgcctgaagaatatatgggagatatcatcggagacttgaactcacgtcgtggacgtattgaaggtatggatgatctcggtggcggaaagatcgtacgtgcgtacgttcctctgtcagaaatgtttggatactctacagatcttcgttccagaacacagggacgtggtaactactcaatgttctttgagaaatatgagccagtaccgaagtctgtacaggagaaagtattatccaacaaaaatgcctaaaatatcataaaaggcttgaaaatcggctaagtttgaaatataatcaaacttagccaggtttaaaatagaaaaccaaaacaaggttgccccattgagggttatatttttaaggaggatattcaaaatggcaaaggctaaatttgaaagaacaaaaccgcattgtaatatcggtactatcggacacgttgaccatggtaaaacaactcttacagctgctatcacaaaagtactttctcacagagtagaaggtaacgcatctgtagatttcgagaacatcgataaggctccagaagaaagagagcgtggaatcacaatctctacagcacacgttgagtatgagacagctaaccgtcactacgcacacgttgactgcccaggacatgctgactacgttaagaacatgatcacaggagcagctcagatggacggagctatccttgttgtagctgcaacagacggagttatggctcagactaaagagcatattcttctgtcccgtcaggttaacgtaccatacatcgttgtattcatgaacaaatgtgacatggtagacgacgaagagcttcttgaactcgtagagatggagatccgtgaagtacttaacgagtatgacttcccaggagatgacacaccgatcatccagggatcagctcttaaggctcttgaagatccagacggagagtggggagacaagatcatggaacttatggacgctgttgatacatggatcccaacaccagagcgtgctacagacaagccattccttatgccagtagaggacgtattctctatcacaggacgtggaacagttgcaactggtagagtagagcgtggaacacttcacgtatctgacgaagttgaaatcattggtatccacgaggacgttaagaagactgttgtaacaggaatcgagatgttccgtaagcttcttgatgaggctcaggctggagataacatcggagcacttcttcgtggtattcagagaacagaaatcgaaagaggacaggttcttatcaaaccaggtacagtaagctgccataagaaatttacatgccaggtttacgtactgacaaaagacgagggtggacgtcatactccattcttcaacaactaccgtccacagttctacttcagaacaacagacgtaacaggtgtttgcgagcttccagaaggaatcgagatgtgtatgcctggagataacgtagagatgacagttgaactgatccatccagtagctatggaggaaggtcttcgtttcgctatccgtgaaggtggacgtacagtaggatcaggtacagttgcttcaatcatcgagtaattaatatctagatagatttaatatcgatacttaaaatgaaaaatgcccgcaggacttcggttctgcgggcttttctattagtgcgcaaatatacaaaaaagtattatcttaaatatgttgtgccttgaaaaatcctattgaaactgaccgcatttctcagtataatatcactgtattaggaaatactttgaaaaacgtctgttagggaagattctctaacggacgtttttggggataattaaaatcatatggctaatgggaggaatttatggataaggcatatttaaagcgggcaagtaccgttgcaaaggtcatttttggaaatgttttctatgcttttgtaatcaaactttttcttttaccggggaatctgatgacaggaggaacaaccggtattggtctggtagtgaagcattttacgggagcatcaatttctggatttgtcttagcatttaatattgtgatgctgatagttggagtgatttttcttggtaagaaatttgcactgacgacaattctcagttctttcacatatccaattgcattggaagcggccaatcatatttttggggatctggtgatcacggataatccaatgctgaatacgatttttgccggacttggaatcgggattggacttggtattgtaattcgaacaggagcttctaccggaggtatggatattccaccgttgattttgaataagtattttcgaattccggtgtcagtgagtctgaatgtatttgatatattgattctgttaccgcagattctatataatcctccggaacgcgttttatacggaattttactggtaatgatctacacgacagtgctggacaaagtgttagtgatgggaaataccaagacggaagtgaagattatcagcaaacaggtggaagaagtacgtcaggcaattcttgcgcaggtagacagaggcgtgacgatgctgtatggggaaggcggttacaaacaagaacaaaagcagattgtattgagtattgtgtctaatcgagaacttccacaagttgagaaattgatcagacagattgacccggaggcatttatgatcatcagcagagttacagaggtacgaggaagaggcttctctttgagtaaacattacggagaagaggaaggctgatgatgctgcaaaaacagtactgtagattaaacatttatagaattaaggaagaacagttgtatgctaaataaaaaagatttcttaaaatacacatcaaaattagcctttccgatcatgattcaaaatttgattggaacattggtaaacattgccgatacggtaatgcttggatacgtaagccagacggcgatgtcagcttcatcacttgcgaaccagtatacgtttattctgttctgcttatattacggtatggctacaggaacttcggttctgtgtgcccagtactggggaaaaggggataaaaagacagtagaaaggattctcggtcttgcggaacggatttcactgatcgtctcgcttatatttttcgttatttcctttactatgccggttacggttatgaagattttcacaaatagtccggatacgattgctgccggaagtgagtatttgaaggtgatttcattttcatttatgtttatggggttctcgcaggtttttatgagcgctcttcgaagtattggaaaaataatgctgccttctattacgtacattgtttctctttgtgtcaatgtactttgtaatgccacatttatctttggtctgtttggatttccaaagcttggcgttacaggtgttgcacttggtactgtgattgccagaattacagaggtattaatttgtctcatctattcattaaacagttcagatgtcagattccggataaaatacttctttgcgaaatcaggtattttgtttcatgactttatgaaaattgccactccagccgtgataaatgatgttgtctggagttttgccacttcagcatttgcagcaattcttgggcatatcggagatgacatggttgccgcaaatgcggttgctgttatggtggtaaatattggtgctattgcctgtcgcggttttgccaacgctacgactatcattatcagccaggagttagggaaagatcaaattgatacagccggagaatacgggaaacggatgcttaggataacacttgctgtaagcctgatcggatgcgttattattctggcgattcgtcctctgatactggacttctatcgggataaattgaccgagactgccctttcttatcttagcatttttataattatgacaacctggcgtcttgtgggagaaggaattaatacctgccttatatgtgggtgtttcagaggcggcggtgattccagatttggaatgatcgtagattccatatttatgtggcttgttgcagttccggctactttccttgcagcatatgtttttaaattaccgcctgtctgggtttactttgtaatgactttagatgagttcgagaaaatgcccgtggtatttattcactatttcagaaagaaatggcttacaaatattaccagagattttgattgaggagaagtatgatcatgtcaaaagatgaatatctaatcacagatgcgcccctgaaagcgttaactgtttttgcaatgcctatgatcttaggcagtttttttcagcagatatataatatggctgattcgatcattgtcggtcagtttgttggttcttcggcacttgcggctgtcggtgcctgtgctgcacttacgaatgttttcatttgtgtagctctgggcgccggtgtaggcgcaggtgtactcgtaagccgttattttggagccagagattatggtaaaatgaaaacaattgtgtcgacatcactgatcagctttttagtcctgagcatactacttggaatctttggtttttgcttttcgcattcaatgatgagtttattacaaacacctgcggatatactggatgaagcagtactgtatctgcgggtttattttgtgggattcccatttctgtttatgtacaacatcctctcaacgatgtttacttccatcggtgaatccagaattccattggttcttctgattttttcatctgtattaaatatttttatggatctttggatggtagccggacttggtctcggcgtatttggtgcagctctggcaacgcttattgcacagggaatttccgcagtcttttcatttctgattttcctttatagaatgagacggtataaatgtcagtttgaatggtttgacggacaggagttatattcgatgcttcaaattgccataccgtcagttctccagcagtctacagtgtcgatcggtatgatgatcgtacaggcagttgtaaatccatttggtacacaggcactcgcaggttactcagcaacgatgcgagtggaaaatgttttttcactgatttttgtatccatcggcaatgcgatttcgccgtatatatcccagaatcttggtgcaaagaaaatcgaacggctcaaaaaaggctatcatgcggcactggtgttggatctatgtttcgcagtccttgcttttctggtcattgaatcactgcacaatcagatttcttccttattccttggaaaagatggaacagctttagcgtatcaggtatccggtgattatatgagatggctggggtattttttcatcttcatgggtattaagatggcaaccgatggtgttcttcgcggacttggaatcatgcgtccgtttctcattgcgaatatggtaaatcttgcgatccgtttgtctgtcgctttgatttgtgcaccgcggttcggaattgcatttgtctggcttgcagtaccggccggatggcttgcaaacttcctgatttcctatgcagcactcagaaaatcatggccgattgaggaagataaaggagcaatatcatgcagaaaatactgattgtagaagacgatacaaatattaataacttgcttcaggaggcattatccaaagaaggctattcctgtgagcaggcattttccgggaccgaagcaaagctgcttttaaatatgcaggatcatgattacgcacttgttctgctggatctgatgctgcccggaattccaggtgaggcagttctggaggaaatacggaaaaagggaaatcttccggttattgtgttgactgcaaaagacagcctggatgaaaaggtagaggttttaacgagcggagcggatgattatataacgaaaccatttgaaatcagggaagtgctggcaagagttcaggtacagctccgtcataaagaagaaaaggaagcagaggaacagcatacgctttcatttaaagatatggtattaaacagaaatacatttcaggttgaaattgctggaaagatacttccgaagattacaaaacaggagtttgcgattttggaattactgctcagaaatccgaaacaggttttcagtaaagaggatattttcgaatatgcatgggacgagccttatatgggtgagacaaagacattggacgttcatatcagcaatatccgcaagaagatcaaacaagtgacttcggaggaatacattgagacagtatggggaatcggttatcgtcttcatgcgtaatctttactctttttttactatttatttgcgtttgattaggattcatcttttatgataaatgcagataagaaaaaggagatgaaaaatttgagtgagatgttattggaaacacgaggactgacgaagcggtatggacatcataaagctgtggacagtgtcagcatgcatattaaaaagggcgctatctatggatttatcggacgaaatggagccgggaagacgacttgcctgaagatgatcagtggactttccaggccaacgagtggagagattgagatcttcggatacaagggaaaggatttacagaaagtccgctcccgtgtgggatgtctgattgaagcaccgggattatatggaaatatgaccgcatatgaaaatctgaatatcaaatgtaagctgtttgggataaagaaagcaggttacattgatgagatattgaaaacagtaggtctggagcatgtgggacggaaaaagacaaaacacttttctcttggaatgaaacagcgcctgggaattggtcttgcgttggttggagaaccggatctgttaatccttgatgaaccgatcaatgggttggatccacagggaattgctgaggttcgggacacgattcagagacttcagaaagagaggaatatgacgatttgcatttccagtcatatactggaggaattatcgaagattgctaccgattatggaatcattcacaatggaagtttattgcaggagcttacaagagaagaattaatgcgaagatgcagtgagcggatggaattaacactggctgatccgaagctggcaattccggtgctggatgctatgggattcacgaattatcaggtgacagacaaagaacatattcacatttttgaacgtctgaatgaaagcgcagcgttgaatatggagcttgcaaaggcaggaattccggtaaaagggctttctataacgagtgaagaactggaaacgtatttcctgaatctgacaggaggtgccagtcatgcttaatatgataaaaatggatttgtaccggatgtttcgcaccaaaagtatgtatgtagtatggatcgtgctggctgtgtcagtactgtttacaacatttatgtgtaagacagattatgattcattaagtaaagaagataccgtgcggcaggagcagtttgcggaaccgactgcggagaatattaatgtgggaatgatggtgacactgccgacagaaccgggagaaaaggttacggtgtatgacattttctttgcaaattctcaggggaaattttatgcgttgtttttggtgatttttgctgtgatgttttcaacagcggatattggaagcggttatattaaaaatattggcggccaggttcaaaaaagaggaacactgattttttccagatctattgcgttggcggtctttacggtgctgacaatggcaggcgcattcttactccagggagctgcgaactatatagtatttaaagaattgacgtggggaagttcaaaagctattctatcttatttcctgacggagctggcacttcattatgcactcgtgttgatctgcatggcgattgcaattattctgaaaaataatgtgatcagcatggtcatcgcgatttgtcttacaatgaatataatgagtatcgtatacggattaataaacagtgctgttcggaaaatgggaatccagaatttccagatttataagtatacgataaccggaaaaatatcactgcttcctatgaatccaagtggaaatgagtgtctggaagcattcggcgtagcgattgtgtttgctgtcataatgatagctgcaagcagtgctgtttttcaaaagagggatatttagcggatgtatatcgtaattggaatattagcaggaattatcattttacaatttattattatgtggaaatatcagcggcaggtgaaggacatctgccgccaattggcgttcttgatgaaacatgacagtaacatgttgattcaacgcgagtttgatttgggtggaatcggaacgctttcagatagattgaatgaacttctggaattacaaaaaaaagagaagcagcgttatcaggagaaagaagctttgatcgcggatacttatacgaacctttcccatgatatccggacaccgctgacatctctggatggatattttcagcttatggaagaatgcgaaaatgtcgaagaccagagacgttatctgaatattattcatgaaagaatacacagtctgaatgaaatgctggaagaacttttcatgttcacaaagttaaaaaatgaatcctatagtctggaactgacgccttgctgtatcaaccggattctgaaagaaacggtgttttcctattatgatgactgggtaagaaggggaatccagccggatattcagattacagaagaactgctatctatagccggaaataaacaaggactccaccgtgttattcagaatgtaattaaaaatggtctggatcatggagaaaagaagataagtattgtgttagaacgcaagcaggaacgcgcggtattacgaatcagcaatcaggtgatacattcggagcagatcgatatagaacatgtctttgacagattttataaagcggatgtggcaaggagcaaaacatctaccggattgggactatctattgcaaaggaacttgtgaaacgtatgaatggagaaatcagcgcaaagacagagaaaaatgagtttattattgagatgagatttccgctttctatctaaaaaatcagtaaaaattgcactttattgagttacaatgctgaattgcgaaaatttagatttaccgaaacactcaaatatgttaatatggtagcagttatttcaaaactatagatcagattgaaggaggtctttacatgattaaattgtacgagaatggcgtatatcttctcaatggaactgagatagtagaagacacagggaatgtgcaggttccgctgacgaaggaagaagccgctcagaacacaatggcatatggtattttaaaggcacacaatacatccgagaacatggagcgtctgcagatccgttttgataagctgacatcccatgacattacatttgttggaattatccagacagcacgtgcgtcaggacttgagaagttcccgatgccgtatgtacttacaaactgtcataacagtctttgtgcagttggtggaacaatcaacgaagatgatcatatgtttggattaacttgtgcgaagaagtacggcggtatgtatgtaccaccgcatcaggcagttatccatcagtttgcccgtgagatgcttgcaggcggaggaaagatgatccttggatctgacagccatacacgttacggagcactcggaacgatggctatgggtgaaggtggaccggagcttgtgaaacagcttctgaacaagacttatgatattaagatgccgggcgtgatcggaatctacttagacggagagccgatgaaaggtgtaggaccgcaggacgttgctcttgcaatcatcggagctacattcaagaacggctatgtgaataacaaggttatggagtttgttggacctggagtcagcaagcttagtgcagatttccgtatcggaatcgacgttatgacaacagagacaacttgtctgtcttctatctggaaaacagatgagaagattcaggagttctatgatattcacggaagaagtgaagattacaaagaactgaatcctggagcggttacatattatgacggtatggtttatgtgaacttaagcgagatcaagccaatgatcgcaatgccgttccacccaagcaatgtttatacaattgatgaactgaacgcaaatctggcagacatccttcatgatgtagagcagaaagcacttgtaagtcttgacggtgcagttgattactctctgcaggataagatcagaaacggtaagttctatgtagagcagggaatcatcgcaggatgtgcaggtggtggatttgaaaatatctgtgcagctgcagatatcatcaaaggaaagaacatcggagcagatgaatttacattcagcgtttacccggcaagtacaccgatttatatggaacttgttaagaatggtgcaattgcagatcttatggaagcaggaactgttgtgaagacagcattctgtggaccgtgcttcggagcaggagatactccggcgaataacgcattctctatccgtcatacaacaagaaacttcccgaaccgtgaaggaagtaagctgcagaacggacagatctcttctgtagcactgatggatgctcgttctatcgcagcaacagcagcaaacaagggattcttaacaccggcaacggcaatggatgtagagtacaaaggacagaaatatcactttgataagaacatttatgcaaaccgtgtatttgacagcaagggcgttgctgatccaagcgttgagattaaatttggaccaaacattaaggactggccggcaatgtcagcacttccacagaacctgcttgtgaaggttgtatctgagatccatgatcctgttacaacaacagatgagctgattccgtccggagagacatcttcttaccgttctaatccactgggacttgcagagttcgctctttcaagaaaagatcctgcatacgttggacgtgcaaaagaagtacagaaagctcagaaagcaattgaagcagatgaatgtccggtagatgctcttgcagaactgaaaccggtgatggataagatccacgagacatatccggaagttggcaagggtaaccttggtgtcggaagtacaatcttcgcagtaaaaccaggagacggatctgctcgtgagcaggcagcttcctgtcagaaagtacttggcggatgggcaaacatcgcaacagagtatgcaacaaagcgttaccgttctaacctgatcaactggggaatgctcccattcctgacagaagaagatcatgaagcactttccttcaagaacggagattacatctttgttcctaatgtgagaaaagcagtagaagagaaagcggatgtgatcaaagcttatgttgtaggtgatgaactcaaagaactgaaccttaagctgggagatctgacagacgcagagcgtgagatcattcttgacggatgtctgatcaattactatagaaatcattagtcaataattgaatatgataaaatgagataaaagcagcgagatatggggaatgacctgtacctcgctgcttttatcttgctaattaaattttcacatgctagtattaaaacgaaataaaatgtaacacgttaaggtataagaatgaaaaaatctgcttatgaaatgtctgatttagttagttgtgcggaacttgagaaccttggacattggggcgatggatgtattatatgaagacggaaagaattatttgtggtaaaataaagcacaagattagaaatattgaaaacaggcggtaaataaaatgatatttgatacacatgcgcattatgatgatgagcagtttgacacagacagagatgagctactaagcagtatggcagcaggcggcgttggaacaattgtggatgcagcggcgacagtagagtcttgggataagatagtagaactcgcagagaaatattcatttatatatggatcagtaggtgtacatccggacgaagtcggtgcactgaatgaagagaatttcgctcgaatgagagaattattaaagaaagaaaagatcgttgcggttggcgagatcggacttgattattattgggataaagaagggcatgatctgcagaaacattggttcatcagacagctggatcttgcgcgagagatgaacaaacctgtgatgatccatagccgtgaggcggcagctgatacgatggaaattatgaaagaacatggaaaaggactcaaaggtgtgatacactgttattcttacagccttgagatggcgcgagaatatgtaaagatgggatattacatcggagtcggcggtgttgtgacattcaagaactcaaagaagttaaaagagattgtggaagaaattccactggagtcaattgttcttgagacagactgcccgtatctggcaccgacaccattcagaggaaagagaaattcatccttgtacctgccatatgttgtagaagcgattgcagagttaaaaggcatttctgcggagcaggtgatcgaacagacagagaagaatgcaagggatttatatcaattataagaaatggagagatgagatgaaagaaccaacacttggaaatccacagaatacgatagaagtattacagaaatataatttcgtattccagaaaaagttcggtcagaactttctgatcgatacacatgtactggacaaaattattgcggcagcagagattacaaaagatgattttgtattggaaatcggaccaggaatcggaacgatgacacagtatctggcatgtgcagcgagaaaagttgttgcagttgagattgacaaggcactgattccgattctggaagatacgctttcagattatgacaatgcccgtgttattaacaatgacgtcctgaaagtagatattgcaaagcttgcagaagaggaaaatggaggaaaaccgatcaaggttgtggccaacctgccatattacattacaacgccgatcattatgggactttttgagaatcatgttccgatcaagagtattacagttatggttcagaaagaagttgcagaccgtatgcaggtgggaccgggaacgaaggactatggtgcactgtctttggctgtgcaatattatgcgaaaccatatattgtggcaaatgtaccaccaaactgctttatgcctcgtccgaaggttggatctgcggtaatccgtctggaacgttatgaagaaccaccggtgaaggtaaaggatgaaaagcttatgttccgtattatccgtgcctcctttaaccagagaagaaagactttggcaaatggactgaagaattcggcagaacttgactacacgaaggaagaaatcgaggcagcgattgaagcactcggaagaggtgcatctattcgaggggaagcccttacgctggaagaatttgcaaagctggcagattttctttatgattgcagataaaataatattaaaggaatttacaaagttgctgtttacaaaaatgtagtggacagcaactttattcttcttcactttttgattcataaagatttaatattcagttaattgtttactagacggatatctagtataattaaaagataaaagacattagaagaaacaagagaaggaggaagagcccatggccaaagatattaacagcatattttttgacatcactccggagattgaagaacttgctctgaaatgtgaaacgaacaatgcaattgacaaagaactctataccaaatacgaagtaaaaagaggacttcgagatctgaacggtaaaggtgtacttgccggattgacaaatatatccgatgtgtgtgcaacaaagattgtagacggtgtatccgtaccgtgtgcaggtaatctttattacagaggttacaatattaaagatcttgtaagcggattccttgaggcgaaacattttggatttgaggagattgcatatctgcttcttttcggggaacttccgaatcagaaggaacttgagaattttaaggatatgatagctgaccgccggatgcttccaccgaattttgtacgtgacgtgatcatgaaggctccgagccgtgatatgatgaacagtattacaagaagtattcttcagctttattcttacgatgacaaagcggatgatacaagcattccgaatgtactgcgtcagagtctgaacctgatcagccagttcccaatgcttatggtttacagctatcttgcttacaattatagaatgggtgaagacctgtatatttatgcaccgaagaaagaactgtctatggcagagaatattctgatgatgctcagagaagatcgtcagtatacagaacttgaggcgaagatccttgatatggctcttgttcttcatatggatcacggcggtggtaacaactcaacatttacaacgcatgttgttacatcttcaggaacagatacttattctacaattgcagcagctatggcgtccttgaaaggaccaaaacatggtggtgcgaacgtaaaagtaacacagatgtttgaagatatgaagacgcagctgacagactggcaggatgatgatcagatcagagcttaccttgaggcactgctggagaagagagcgtttgataagagaggtctgatctatggaatgggacatgcgatttattctgtatccgacccaagagcggagatcttcaagaagtttgtaaagcagcttgcatatgaaaagggccacgaggcagaatatgtactgtatgagaaagtagagaagatggcaccggagatcattagcgagagacgtaagatgtataaaggtgttaatgcgaacgtagatttctacagtggacttgtttatagcatgcttgatcttccaccggcattatatactccaatttttgcggcagcacgtatcgttggatggagtgcacacagactggaagagttgaagaatgtagataagatcatacgtccggcttataagccgcttgcaccatatcgtgattatatcaaattagatgacaggtagtgaatgaacgatgagagatgagttttatttcccttcaaaggatggcaatacggagatccacacgattgagtggaaaccggaaggagaagtgaaagctgtcctgcagttaagccatggaatggtggaatatattaagagatacgatgaatttgcagaattcatgtgtagtcatggatattatgtcgttggaaacgatcatttaggacatggaaaatctgtgcagagcaagtcggagtatggattttttaacgaaaaatatggaaatgcatgcgtgatcggagatatgcatacacttcgtcagcggacgatgaagaaatatccggatgtaccttactttatgttaggacatagcatgggctcaagtcttttgcgccagtatgtacagatgtatggaaatgggctggcgggagcaatgtttatcggagttgtagcagatcagcagagagcgacacttcagtttggaagaagattgtgtaggacactagcgatgttccgtggctggcattataaaagtaaactggtggatagaatggcagtcggtgcctataataggaaattcaagaatccaaagacacgcgcggactgggtaaccagtgatgaagaacatctggaaaaatatatttcagatccactgtgctcctttgtctttacagtgaacgcgtattatagcatgtttaccgggatgcttataatggagaaaaaagaaagtatctatatgattccgaagcagcttccaatccttttcgcagccggtgccgaagatccggttggaggattcggaaaaggcgtaaggaaggtttatgagaaatacaaagcggccggaatccaggacatcagtctaagactgtatgccggtgatcgtcatgaactgcttaacgagacagatcgggagcaggtatatgaagatcttctcgagtggatggaagaacgtagaaaaataaattattagtttatattttttcataatctgtttatattttttcgtattctttaagaaagcactcatacttttgacacattttccggatatactaatatcaagatagttgataagagaaaatcaattatcttcccccctcataaagttgtgacacaggaaagtgtcaacactttactctcattcctttagataactataaacacaacgaagcccgttagccgaaaggttagcgggctttcgcgttgcagtgataacttagatgctgccagaatataggtggtgttatatataaaggaatcctgtacgacatcatatgaaaacacaaaaagtaagacccgagcacctcactgtttcaacagatcggcaatcgggtcttctttttattatctaaaggaatgagagtaaagtcgacatcccggcacaccgggatgccattactttatgaggggggagatagttgtttatcaactatctgagttttagtatagacagaaaatgtgtcaaaattatgttcaaacattaaaagaaaaataaattaaataaaataaacttaaccctgaacgcttacaaacacttcatagaccttcttgagtgatttatgaagataaggtttgtactcttccatagaaacaggtttctcatgaaggatacagttgtaacttgttgaactgatcaattcaattagtgtaaaaagtaagagatccggattctcacagtttacgttatattttacaagtgaatttctgtagtgatcataaaattgcctggacactacagaacctgttccgacagcatcctggaaaactccccaggagagattctttgacaaaaattttaacaaggactgctgtttctggaaacggtcaataatatagtctgttaaaaaaagaatctcttcttctaaagaattaatctcagtgccttcaagctgcttgtgtgcatcatcaaaaagctgacaggctttgtatgcgatcaatttatctcttaaatcatacttgtctttgaaataaagatagaatgtcccctttgccagaccggcctgattcacgatgtcggatacagttgttttggcaaagccttttccggtgaacaggtcaaatgcagtctggagcagtgtattcattttcagctttttattatcatctacttttcccataatctcaatgacctcctttgtgtgtctttagtgagtgtaatatataatacaaactttgccaataagaggttttcataaaaatacattctgtgaaaaattcctattgtctttttactagtatggcacaaaattcccaaaagtcaataaaaatgactatttttcattttttaacaaaaaaatattgactaatggtcatttcgagctatactataagagacttgagtagtgagacagtataggagatgatacaaatggttaaagttggcaaatggattgccaaacacagagttctgatgttgatcatcggatttcttctaattatcccgtcggtcatcgggatggcaaagacacgtgtaaactatgatttgctcagttatctgccggagcatctggagacagtaaagggtcaggatattctggtggatgagtatggaatgggcgcgttctccatggttgtggtagagaacatggacatgaaggatgttcagaagcttgaagatcagttcagtgaagtatcgcatgtaaaagatgtactctggtatgacgatgtagctgatatcagtcttccggtggagatgatcccaaaggatttaaaggaggcgtttttcaaaggcgatgccacgatgatgcttgtattgtttgataatacaacatcttctgatgaagctatggatgctgtcggacagatgaggaagctggcgaatgatcagtgctttatcagcggtatgacaggagttgttacagatattaagaatctggcacttaaagaacttccggtttatgtggtgattgcagcacttttaagtctggtcgtacttgaactgacaagcggatctttcgtagtaccgattttatttctgatcagtattgggcttgcgattctctacaatcttggaagcaacattttctttggagagacttcgtatatcacaaaggcattgactgcggtattgcagctgggtgtgacaatggattattccattttcctcttgaacagctacgaggaaaacaagaagcgttttccgggagagaaagaacgtgccatgggacatgcgatttccaatacatttaagtctgtggcaggaagctctgttacgacagtagccggattcgtagcgttgtgtgttatgacatttgcacttggccgagatcttggtatcgttatggcaaaaggcgtattgatcggtgtgatctgttgcgtaacagttttaccttctttggttcttgtatttgataaaccaattgagaagacaaaacataaactgttgctcagcaacatggataagccatcagcttttattacaaagcactataaagtatggatcgttgttttcctggtacttttattcccggctatttatggaaataatcacacaaagatttactacaacattgcagattcactcccgtccacactggacagtaatgtggcgaatgcagaacttaagaaagacttcgatatgagtaatattcatatggttatgttagatagaagtatggatgcaaaacagaagtcgaaaatgttcgatgagattgattctgtgaagggtgtcaaatggacgatcagtatgaattcgctgattggaccggcggtgccggactctatgataccaaatgatatcaaagaaatgctgcaaagcgatgattacgagcttgcatttgtatgctcggaatatgaatcagcgacagaggaagtcaatacacagattgcatcgatcgataagattgtaaaatcttatgataaaaatgcgatggtaattggagaagctcctttgatgaaagacttggaggatgtaaccaatgtggatctggtaaatgtaaatacactttcaattgcagcgatatttatcattattatgattatcttcaaatcaatatcactgccaatcatattggtggcagttattgaatttgcaattatggttaatatggcaatcccgttttatcagggaacaagccttccatttgttgcaagtatagtaattggagcaattcagttaggagcaactgtagattatgcaattctaatgacgacccgctatcagaaagagcgtcagcgtggacgagataagatggaagcaatcagtattgcccataaaaccagtatgccgtcaattatcagcagcggattaagtttcttcgcggcaacatttggagtagcctgctactcacaggttgaaatgatcggttctatttgcactttgcttgcgcgaggcgcgattatcagtatggttgttgtaatcctgatattgccggcgatgtttatgatatttgacaaagtaatatgtaagacgtccatcggattcctcggtggaaaaaagtagaaaggatgtaagaatcatgaacaaaaacagaaaaatcaaacgtggactcacaacttctcttgccgttggaatgtcagtgatgatgggcgctgtgccggtctttgccgcaggaacaagttctgacgcagatgcagtttataaggaagagacagtttatgtaaatgcagacgcaacaggaacaattgatgacgtaacagtatctaactggctgaagaattcaggcagtgtatcaggaagcctgacagatgcaagtactctgaaagatattaagaatgtaaaaggtgatgaaacattcaaagcatccggagatacattgacatggaatacagacggtgaagatatttattatcagggaacaacagatcagaatcttccggtttccgtaaagcttacttactatctggacggaaaagaaatcaaaccggcagatctgaaaggaaaaagcggacatctgaagattcaggtggattatgcaaataaagagaagaaaacagtcagcgtagatggaaaacaagaagaagtttacacaccatttgtcatgatgacgggaatgatccttccgaatgaaacatttagcaatgttacgattgataacggaaaagttatttctgatggaagcaagaatatcgtagtcggattcggaatgcctggcatgaaagaaagtttgaatctggacgaaagcaaaacagaagatctgacaatcccggaaagtctctgcgtggaagctgatgtgacagatttcacaatgtcttctacatttacagtggcacttaccgatcttcttgatgacattgattttgataatatcgtagatgttgattcgctgaagagttccttagatgaactggaagatgcagcacttcagttagtaagtgggtctgacacacttgcagacggagccggaacacttgcagacggtgtcaacagctatacagaaggtgcggatactttgaatgatgcaattcagaagtaccttggaagcaatggagaactgaacggaagcgtgacagagtatgtgaatggtgtcaataaagttgtcaaaggcgtgcaggattatacagacggaacaaatgcactggctgacggagttacagcttatattggcggtgaacagcagctggcagcaggtgccgcgaaactgagccagctcagcagcggactgaaaacagtacagggagcgatcagtcagctgaatgcagcgattgacggagaaggagcagcgacagaagatattcaggtagcagccggccagctggcagcgggaacagcacagctgaaagcagcacttggaagcaaagaggttcaggcacttttggggcaggtaggaaatatgttggcgacaggaactgaaatgatcaatcagacagagaagcttggaacagcgctgaatgatggaattgcaacaccggttcagaatattgcagctaacctcacaagtctgagtcagcagcttggaatgattaaccagcagcttgctactttggacacaacttgtcagagtgcagtagatgatctgaatgcaaagatcagagattataatgataaggttgatacagcaaaaaatgcagcagcaaacagcaaagcaacaattgattctgcagtcagtgaattacaggcgaagaaagatcagacaacagacgagactgcaaaagcggatcttcaggcagcaattgataaattaaatgcagcaaagagcgcggcagacggattgagcggactcgagaaggcaagcgaagttagtgtgacaattccaacaattgatacaacagcgatccagcaggagatgggagcaatcagtgtgtcaatgaaaacatttcagcagacagcacagacactgacagctcagcttccggcaatgcaggagaaacttcagacaatcacaagtatgaaggataaacttccggcggaagcaatcggacagttatcagaatctgtagatcagctggatgcaggaatgcagggattaaatatagcaatcggaacattttcatctaaccttggtgagttaaacaaatctgtacaggcacagttcccggcagcagttacgggtattcttgaactgaacggtggattctcacagttgagtgcaaataatgacgcacttttagcaggagccaacaaactgaaagctaacagttcaacactggtagcaggagttcagacacttcagagcggaacaaaccagctggcaagcggactaaatacactgggaagccagatgtcatccggagcggcaaaactttcactgaacagcgcagcccttcgtgaaggtgcagcaactcttcagtcaggagcaagagaactcgcagacggtatggagaagttcgaccgtgaaggaacaagcaaattaaagagcacagtagaagacgaacttggtgatgtacttgaccgtttcgatgcacttacatcggatgattgtacttatacaacattcagtggaaaagacagcggaatggaaggaaacgtgaaattcgtaatcgagacagaagcaatcgagtaaatcgtatcatctctataatataggaaaaacggagaaatccccgaccaggatttctccgttttgttactgtgtcaatcagcggagtgattgacacgggagtgaacagtaactccgtttttcgttttggaatttgccatcacaagaagggattgcaaaaaataccattatgtagtagtctgtctatagagatgctattgaatgcacagtagaacaaattgatagtagaaattatggtatgtggggaagatatggaaggaaatttaacaaagggtcctattttaaagaccttgacaaagttggcgataccgattatggcatcgtcatttttagggacattgtataatcttacagatatggcatggatcggtctgcttggttcgaaggcagttgccggagttggtgtcggaggaatgtacacctggctgtcacagggactggcatccatggctcgaatgggcggacaagttcaagtagcgcaatgcatcggaaaaggaaatagagacgaggcgaataaatatgcacagaccgcagtacagttagctacattgatgggattagtatatgcggcaattgtattgctgtttttacatcgattgatcggcttctttcatttggatgatgcagaagcaattgcggctgcactttcttatacaagaattgcctgcggtttgatcgtattttcatttctgacatttacattgacaggtatttatactgcacagggagattcaaagactccatttattgcgaacctgatcgggctggtaattaatatgatcctggatccggtactgattcttggaccggggccacttcctgaattgggtgtggcaggtgcagcaattgcgactgtaacagcgcagggaattgtaatgagtgtgatgattatcggaatctttgtgcagaagaaggataatgtattaaaaggaattcgtctgtttgcaagaattccgatggaatatgtaagtggaatctgcaagatcggaattccgacagcacttcagggaatggcttattgtgtaatctcaatggtacttgcacgtatggtatccgtctttggtgctgaggcagttgcagtacagagagtcggtggtcagattgaatcgatctcatggaatacggcggatggattcgctgcggcgctgaatgcatttgttggacagaactatggagccaacaagatggatcgtgtcaagaaaggatacagagcatctttatggacagttggtatttggggattgataattacaacaatatttgtatttgttccaaaaccaatcgcaagaatttttttccatgaagcaacagcaattgaaatcgcagtagattaccttataatcgtaggactcagtgaagcatttatgtgcgtagagcttatgacggttggggcattgtccggacttggaaagacacatctgtgcagtgtgatttcaattatatttacaggagcgagaattccattagcaattctcctttgcagaacagcactcggacttaatggaatctggtgtgcagtttcatcgacatccattgtaaaaggtattatctttgtagcaacattcttctggattacaagaagttcaagaatacttaagaataatagcaggctttgattaagaaaagcctgctattattcttttataaaagaggatagttcaaggaaggtattggagaaaaaatgaaaatagaaaaacgatgggaaaataatagaagtaaaatgatatcatatattgtatttgtagcatatctcttcttactgacatggcttgtgctgtttaagtttgcatttactatagaagaaatcccacatttaagacaactaaatctaatcccatttcattacgaaacaagtgttgcgtatataacacatatgaaagaggttatatacaatatactgatatttgttccggcaggagtttacttcactgcatttctgggtaaaagaaaatggtggttggggattggagcatcattttttgtgagcctgacatttgagacagtacagtggatattctctattggcgtaagcgatattacagatttaatcggaaatacacttggcagtggggtgggagcagtgctctttgcatttcttggaaaaatattgccaaagaagagaatgagcatgatcaatggaatcggagcagtggttgaggtggtcggaattgcattactgagtatgctgtttgtgacaaataagtaagcatgcaatattcgtagcatttgggaacgcagtttacgcatttgcaacaaccgaaagaactgacgtcctttcggttaagggcattcgccctatgttccccacccctatcagcttactgcaagcaagcttgcaatagctgttagtgtttgggaacgcagtttacgcatctgcaacaaccgaaagaactgacgtcctttcggttaagggcattcgccctatgtttcccaaccctaccagcttagtgcaagcaagcttgcaacacctgctagtgtttggaaacgcagatgctaattttcagaatattctgaattgcatgaaatatataaaaaacattgacaattaaaaacggctgtgttaagataacattcgtcgctgagaacggcactgaaaactatagaacgaaagcttactttagaggaaggcgcggaggcggacagtccctgaggaaagaaagttcaaaagagcagcttataagaagaactaataaaaacttataagaattgttaaaaagtggttgacagaaaagtttgaatgtgataacataaatgagctgtcgaagagaagtggatgagtgactcacaaacagcaaaagaaaaataaaaaagttcttgacaaagacaaaggcttttgataaaatataaaagctgtcgcttgaaaagaacgacacaaacaaagaaccttgataactgaacaatagacaacaacaacccttgaaaatttctttaagagaagatttttaagaacggtttttaacaaaccaaaacaacagtaaaaagggaagaattagctagttagttgattctgaactggatacaaacacttttaacgagagtttgatcctggctcaggatgaacgctggcggcgtgcttaacacatgcaagtcgaacgaagcaccttgatttgattcttcggatgaagatcttggtgactgagtggcggacgggtgagtaacgcgtgggtaacctgcctcatacagggggataacagttagaaatgactgctaataccgcataagaccacagcaccgcatggtgcaggggtaaaaactccggtggtatgagatggacccgcgtctgattaggtagttggtggggtaacggcctaccaagccgacgatcagtagccgacctgagagggtgaccggccacattgggactgagacacggcccaaactcctacggagagcagcagtggggaatattgcacaatgggggaaaccctgatgcagcgacgccgcgtgagcgatgaagtatttcggtatgtaaagctctatcagcagggaagaaaatgacggtacctgactaagaagcaccggctaaatacgtgccagcagccgcggtaatacgtatggtgcaagcgttatccggatttactgggtgtaaagggagcgtagacggagtggcaagtctgatgtgaaaacccggggctcaaccccgggactgcattggaaactgtcaatctagagtaccggagaggtaagcggaattcctagtgtagcggtgaaatgcgtagatattaggaggaacaccagtggcgaaggcggcttactggacggtaactgacgttgaggctcgaaagcgtggggagcaaacaggattagataccctggtagtccacgccgtaaacgatgactactaggtgttgggcagcaaagctgttcggtgccgcagcaaacgcaataagtagtccacctggggagtacgttcgcaagaatgaaactcaaaggaattgacggggacccgcacaagcggtggagcatgtggtttaattcgaagcaacgcgaagaaccttacctgctcttgacatctccctgaccggcaagtaatgttgcctttccttcgggacagggatgacaggtggtgcatggttgtcgtcagctcgtgtcgtgagatgttgggttaagtcccgcaacgagcgcaacccctatctttagtagccagcggtttggccgggcactctagagagactgccagggataacctggaggaaggtggggatgacgtcaaatcatcatgccccttatgagcagggctacacacgtgctacaatggcgtaaacaaagggaggcagaaccgcgaggtcgagcaaatcccaaaaataacgtctcagttcggattgtagtctgcaactcgactacatgaagctggaatcgctagtaatcgcgaatcagaatgtcgcggtgaatacgttcccgggtcttgtacacaccgcccgtcacaccatgggagtcagtaacgcccgaagtcagtgacccaaccgtaaggagggagctgccgaaggtgggaccgataactggggtgaagtcgtaacaaggtagccgtatcggaaggtgcggctggatcacctcctttctaaggaagaaaaaagtagagagtttttactgttgtctattgttgggttatcaagtaacctaaaccttttggtggcgatgcgcttaggggtaacacccgttcccatcccgaacacgatggtaaagacctaagcggccgatggtactgcactggagacggtgtgggagagtaggtggccgccaaattaaaagaaagaaactaaggcagagacgctgccgaagttgaacatatagatacaggcaaagatgagcaacaacttatcaccgccaacccaatcagcagggcagtgctgttatgatagctggtttcaccagtgattagatatacaaagagatttgtgtatgtaatgactgatgaaaatatcagtcggatgaagaactgaataagaacttcatcttatgtaccttgaaaactacatatagtaaaaatcaatagatttagataaatatctaatcaagacatccgaggtaatgttaacaacattaacttacagtctgaagaaaacagacttaaaataaattgactatcaccaacgcatacaacgctatgtatgtgtggacgttatcccattcccgtgggatgaggtcgagttggttatgctgataagagcgtatggtggatgccttggcactaagagccgatgaaagacgtgataagctgcgaaaagcttcggggaggagcaaatatcttttgatccggagatttctgaatggggaaacctacttgagcaaacctcaagtatccttaagccaatacataacttaaggaagggaacccggtgaactgaaacatctaagtagccggaggaagagaaaacaacatgtgattctgtgagtagcggcgagcgaaaacggaagagcccaaaccagcgtgcgtgcatgctggggttcggaccgcggaattgattcaacgagtttagcagaacggttttgggaaagccggccagagagggtgaaagccccgtaagcgaaagacgagttgacatggcgggatccagagtaccacgagacacgtggaaccttgtgggaagatgcggggaccaccccgtaaggctaaatactacttagtgaccgatagcgcatagtactgtgaaggaaaggtgaaaaggaccccgggaggggagtgaaaaagaacctgaaaccatatgtttacaagctgtggaagagctttatatgctcaaccgcgtactttttgtagaacggtccggcgagttacgctggctggcgaggttaaggactaaaggtccggagccgaagggaaaccaagtctgaatagggcgcatagtcagtcggagtagacccgaaaccgggtgatctatccatgtccaggttgaagttgccgtaaaaggcaatggaggaccgaacccacatccgttgaaaagggtggggatgaggtgtggataggggagaaattccaatcgaacccggagatagctggttctcctcgaaatagctttagggctagcctcatacgagtcttgcggaggtagagcactgaattcctaagggggcgtcaaagcttactaagggatatcaaactccgaatgccgtgtagatgatgtatgggagtcagacgatccgagataagttgggtggtcaaaagggaaagagcccagaccaacagctaaggccccaaaatgtgtgttaagtggaaaaggatgtgggatttcgaagacaactaggatgttggctcagaagcagccattcattcaaagagtgcgtaatagctcactagtcgagaggtcctgcgccgaaaatgtccggggctaaaacacactgccgaagctttggaattgagaattcaattggtagaggagcattcttaaagggacgaagcagtaccgaaaggagctgtggacttttaagaagagagaatgccggaatgagtagcgagaggaaggtgggaatccttccggccgaatatctaaggtttccagagtaaagctgatctgctctgggtaagtcggggcctaaggcgaggtcgaaagacgtagtcgatggataacaggttgaaattcctgtactatcctgtaacagaactgtggggacacaggcagagagcgtgagccgggaatggaaaaaccggtacaagcgaggtaggagaagagttggcaaatccgctcttcaatctgaagacgtgatgtggactgaaaataagtagggaagcacgtgagctgactgtcaagaaaagccgctattgtttgcaggatacccgtaccgtaaaccgacacaggtggatgaggagagaatcctaaggccgacgggagaagcattgttaaggaactcggcaaaatgactccgtaacttcgggagaaggagtgccagtaagatggccgcagagaattggcccaagcaactgtttagcaaaaacacaggtctatgcaaaaccgaaaggtgaggtatatgggctgacgcctgcccggtgctggaaggttaaggggagaggttagcgcaagcgaagctttgaacttaagccccagtaaacggcggccgtaactataacggtcctaaggtagcgaaattccttgtcgggtaagttccgacccgcacgaaaggcgtaatgatttgggcactgtctcaacaatgcacccggtgaaattgaaataccagtgaagatgctggttacctgcgccaggacggaaagaccccatggagctttactccagcttgatactgggattcggtattgcatgtacaggataggtgggaggctaggaaatggtaacgccagttgccatggagccaatgttgggataccacccttgcagtactgggtttctaaccagcagccgtgatccggctgggggacaatgtcaggtggggagtttgactggggcggtcgcctccgaaagggtatcggaggcgctcaaaggttccctcagaatggttggaaaccattcgaagagtgcaaaggcagaagggagcttgactgcgacaccgacgggtggagcaggtacgaaagtaggacttagtgatccggtggtataaagtgggattgccatcgctcaacggataaaagctaccctggggataacaggcttatcactcccaagagttcacatcgacggagtggtttggcacctcgatgtcggctcatcgcatcctggggctgaagtaggtcccaagggttgggctgttcgcccattaaagcggtacgcgagctgggttcagaacgtcgtgagacagttcggtccctatccggcgtgggcgtaagatatttgagaggagctgtccttagtacgagaggaccgggatggactggccgctggtgtatctgttgtcttaccaaaggcatagcagagtagccaagccgggaagggataaacgctgaaggcatctaagcgtgaagcccccctcaagatgagatatctcataacgtcaagttagtaagaccccttgaagacgacgaggtagatagggcagaggtggaagtgtggtaacacatggagctgactgttactaataggtcgagggcataaccaaagcagtgataggtttggatgatgatgttggttttagctgtatgtagttttgaaggtacatggaatatagacaggaatgagaagcagtgcgaaagcgctgtttttttcttgcaaaaactaaaagtgctacattgcacttctataaaaatacaaatactcaacaggcgttactattacgtaaactgtgaatagtttacgctattactatgaaataatccagaattaattgataaaagagaaaatttatcagttgattctgggttattttttggggataaaacacgtaacttcttgaaattgtgttataaatcttgaaattgtgttataaatcttgaaattgtgttataaatcatgaaaatttaatattcattaaattggaaagttatgttaatatagtgtatgaaacaaagacaagagaatgccgatagacagcagaggagagacagaagtatattatcggtttatagaaaagggatggagttcgaaaaatgagaggaaaggcaaaacagagagttagtctgatacttgtagtgacaatggtactcggaacagcattaacaggaaatactgtatttgcaacaggagagagcagtgacgaacaagatcggataaaaattaacatttctaaagattctgaacaaactgtggaacagaatgttacacagacaattcatgtgactgcgcaggggcagtgctcgcaatcagtctgtctgaatgtatatctaaaaaacgaggacggatctgcggcaacagatatagatgcagtcaatcttctgacaagcgatcagcttacagataaaaacacacagaaaacaatcgatgagacattgaaagattcagtgactcttaataatggaacaaaggcaagtccaacagcagagtggaagaacgacaaggacgataatggaacagttacttctaaatatctgcagatcacaatgccggcagatgcaatagcaatcaactttgatatgcagcttcagtatcgtacagatgaagcaagctatacaaagaaagtgctggttgaggcaaaggcattcgaagaggagcaggatatcacagaagcagctaagagagcagacgagagcaaagagaatgaagcgacagttgcctgggaaggtcaagcagtaagtcaaccagaaagcgaagctgcggatgaggatgcggacggagaaaatgaatcacaagtaatggctgcaagtgcagagaccggagtgacaatttactttgcagcaccgaaggattggacggataaggaatatacaatagaagcaaagggatgcgaatcaaatcccgagaatagatggatctgccaagagatggtaaatactggagagacatacaataatcttcaggtatataaagtagttatgtcgtatccccaatatggtggatatgataaatttcaatttctagctaagtcaagaggtcaacaacaagattataaagaagtttttcaaaattggagaacagtagctgaaattgatggaagaattttttattctgatgggaaatcagaagtttacaatcccttcaatcctaacgaccacacctacttcgctggaaaaaacattcttttctacaacaaaggaacagaagatctttccggtggtgtaacagcagtattctatgaaaaggatagttcaggaactctgaaagaagtaaaacgaatcaagatgacagccggtactgaaaacacaaaattttcagtaacaattccagatgaggcgtgctcctacattcgttttgtaagtacatcaaatggaaaaacattaggtgattcttactcgaatttctatggacagggaaatgaagaagcagatgtcactgaacactttgtatacagtgactcaatgtattgctataactacaatagtactgcagataattcttcttggggaatagcaggtgcagtaacagtttattacgacgctacattatccaaactgtcctataaagatacagatggtgcgaaaaatggtcaaggaattccatatccaggtacgacgaatgtttattattatgctacaaacggaacgggtgtaaaaactggggaaatggaattagataataaagaaggctatccagatgtatataaggcgaatcttccggatggatacaataaagtaagatttgcagcttatgatctcaagaacgcaaatgtatcacaaaatggtgatgtgacagatttagtaacgattccaggtggtttgatgaatccgtgttattacggtgattcaagtgatgatgttatttacaaagatggaaatcgtggtggatattgggatgaggtttataccgtaagagatcctgaaaaagaagcagaacaacataatagtaaagatgttgtagatattaaagaaagtgaacttacaagaaatgcgagtactttatatgtaaattcaacattttatgattattatacagattatgaattgaacgggaaaaaccgagataattatgatgattaccaagcatcttcacaaagaacttatgttacctttcgtcagtttgaccaagcactcagtgattactataaaaagaaagaagtaagtataccgatttatacaggtcattttcagccagattgttgggataatcctttttctaaaatcgccgataaattagaactttatggatatgaagataaaaaaaatggttttatgtctacgaacaactcagcattgaatgcaaatggagttagaaaagacgagtacgtttattccgcagcgcaaggattggtagcaaatgcattaaatgaaaacaatctaatgacttcagataacaaagtattagaaccgcattttaatgaggaatttcttacaggagataatagtaagcatacagcgcttgcaaagatatataagaatgtttcgtttccttttacaaaacaaaaactgaacgatgaaggagaaaaagctgataacggcgttgaatactggtactttgatagtgcagatacaacactggcaatgcgtactgatacagaatcagggaattattatctggagaatgtaggggggaaacaagactgggcaaaaaatgtagatagtgccagtagtgataaaagaacgcatggttttttcccatttaatgaaacatcaactccatgcaaggcaagtaaatataactatggatttggtacgaagttagaatttaaattccgcctgacagacaatggaactgtagtaggaacagatggaaaagaacatccaattaaattcaacttctccggtgatgatgatgtttgggtgtatgtggatggaaatcttgcactggatgttggtggagcacatggaaaagtaacaggtcagattgactttaaaaacaaaatagcaacagttagcaagacaaaggtaagtcaaggatctccaacagaaggtaatgacactcggagtaaatttaaaattaaaggttcaaattctgatgaacatacattaaccatgttttatatggaacgtggtatgtgggaatcaaatatgaaagtatccttcaacttcccggatgaaaatgaattcgctgtggaaaagaaagttgatacgacagatgtgaatacagatttattcccgacatcattatttgaagatgctaacgtattcccattcacgattcaaaatcaggcaacacattatggaacaaaagaagcacaatcttccgatgaaaaacagcctaaaacttataatgatagtttttcagcagaaaagttatcaaaaacgtttccacaaaatacatttgaaactatagataagaaggctggtcagacaaatgtggttcactggaaggcaaaaagtgacgatgcggaaggagagcatattaacaaaagatttggaatcatacgaccagcaaatggagaaacatttgatgcatctgatacaaatgcattcttgcaattcaagatgtactatgactatcaggacattccgggacttacaagcacctatctggaactggaagatgataatgaaaaaaaaataggaggttatctttcaggaaagacttacggaaacagtagtcttgtacataatcaatggaatacgattcaggttgatctgagtaaactacagggagataatacatttgattattccaagataaaaaatatcaaatttaattataatttcgagagagatatttacttggatgattttatattcattccttccgttgtagcagcagccaaaactggatttgtaacacaacaacaggatattccggattatggttctgcgacaagtggaacgttgaaatatccgaaaggagcacagtatacattatctaaaaatgatggctcatcaaaactgtacagaattggcagtgacggaatgttcgccttggcagatggagagacagcaacatttagtgatcagtttagacgaggaagctacattgctgtatcggaagatgtgaattcatcggtatttgatacgacatggacactttatgaaaatggacaggctgtgtcaacaatgggaaacggagatacggtggtaaatgaaaatcctattccatcagtccaaaatgttaaaggcaataccattcgggatggtcgtaaagaagaacataagtctggtcaaaataatagtgtagaaatagctaacagcggatatccttctactggatatgcgaagaatcaagatggtcagacaaataatgaaaatacaattgtattcagatcatatgtagctcctgataatcagacaactatgacaaagctgaaagcaacatttgtcaataaagtaaaaaccggaaaaatagagattcggaaagaaactgcagaaggatcgaatacattggagggggactatacattccgtgtagagttcagtaatgttgcagagctctcgttggaatctaataagattgtaaaggaatatacaatcaaagctggagagtcggtgactattgacggaattccggcaggaacagattatagaatcagcgagattaatagttcagatggttccacattggaaagtgtaattgtaaataataataattcattcgatgcaggatatgatccagtcacgaaagttgttgccggtaaggtaattgcttccagtgatatgaaaggggatggaataaaaaatccagatacatcatcggatgctacaattattactttcaagaatacgttaaaacctacaatcaatcttaatcttacaaaagtgtgggaaaatacagagagtatcacacttccagattcaattaagatccggcttcagagaagcaaggataaaggaacaacatgggaaacagttaaatacgatggaacaaacgaaacaataacactttctcaaggatatgacggaaagtggagttattcattcaaagatctggatcaatatgtgaattatacagcagatccaaaggttccatatatctatcgagttgtagaggtatcaggagacgatggaagtgagacggtgattgaaggtgacggatacctgaacgataagtacaaagtaacatacagtgagaatgtagattgttcaaagatttccacagagactccggaaagtaaaacacaatcctttaaaataacaaatacttacagtcctaagacaaatattaagatcacaaaacaggatgcatcaactaaggaaccactgaatggtgctaagtttaaactggaaaagatgaaggaaaatacatcgacaggaaatcttgttgttgataatagtttcgaaacccaaacagtaacaacaagtggaggtgacagtgattctcctttaggaattgcagaattcaaggatctgacagatggaacctatcgtctgacggagacaaaggcagcaaagaatcatagtttgttgaaagatccggttattatagtgatcaacaggaatggaaagagtctgattgataataaagagtgtgaggtagtggataataccatttctattacgatttctaatcaggcaagattcaatcttccagccacaggaggatatggaaggtacattgtgatacttggggggattgcccttgcaggggtaggactcttcatgtatagattacaaaaacgcagaaaggagggtaacatctcctagacgcaacaataaaaagaaataataacacgataaagtgaaagagaggaaggaaagtatgggaaaatttagaaaaatgctggcaggcgtgttaagtgcagcaatggtactgtcaactatgacagtgacagcatttgcagaaactagtacaactacacctgcaacaattgacacaacaaaaacaggatctattacaattcataaatatgaatataatgaatcgggtggagaagctggcacaggagaaataacagatgtaaacaaggtcccaagtgatgcaaaagctcttgaaggagcggggtttacgatttataaggtggcagatatagatgacttagcaaagtattataatgctaatccggaaagtcttccgtcagtggatgactatctgacagatggagaaattaatgcttcaaaagttttagaaacaaaatcagaagttaaaacagataatgcaggtattgcaaagtttgacaatcttgctcttggtttctatgtagttgttgagacaacaacaccggataaggttacaacaccagttaaaccatttatcgtatccgtaccaatgacaacaaaagacggagataattggttatacgatgttcatgtatatcctaaaaataagacaacttatggtggagtaacattagagaaaacgggaaaagatggaacaaagcttgaaggcgttacatttatacttcagaaacagaatggatcaagctgggttaatgtaacaaagaatgagaatacaggtgatgatttaactcttaaaacagataaagatggaagaattactgtagagggtctttcacagggcaaatacagatttatcgagactgaccgtggaactaataatggttatattatggatggtgctactgtatatgagtttacagtaacagcagatggaaagattgtttatgatggtaagacagagaataacattataatcactgtaaagaatgaaaagcctgatatgacaaaacaggtaaaagaaagagataaagataattggaaacaggatgctgactataatgtaggagacatggttccatataagatcaccattgatgttccatccaatattacaaatttaaaagaatttacattaacagatacaccgacaaatcttgatgataaagaagtaagtttacagtgtgaaggttcagatgtagatttaaatgcatattctgtagcaaaagaaggagatcatggatttaaaattacttttactacagaaaatatggcatcatatgcaggaaagcagattgtagttacatataatgcagagcttcttggtggtgcagttactacaataaatggtaaccagaatacagcaaaacttgagtattctaacaagattcttccgggacaggatgataaagataacccgaacaggcctgaaaatccagatataaaaccaggcaaagattctatagaagatagcgcagttgtttatacattcaaacttcagattctgaaaaaagctgaaaaagcagatggtaccccattacaagatgttgaatttgatctttataaagaggtttcaaaagaaactataaacgcaataacaggtgctaaagcaaagaatgttggacttgacagtgagaaatattggttaaaaatcaatacagatcctttaaaaacagatgaaaacggtgaagtgtcacagtccggtcttgcaaatggaacatattatcttgtagagacaaaaacaaacaagaactataatctattaaaagaaccagtaaaagttgaattaaatattgtttacacaacaactacaaagacagagtgggtaactgatgaaaatggtgttaagactcttgtaaaaaatgagattacaaagacagaatttaaagaaggatcagatacttcaacaggtactcacacagaaactatcatcaacaagaaaggtttcactctcccaataacaggtggtatgggaacagttctcttctccatcgcaggttttgcactgatggcaggagcagcatttgtacttctgaaaggtagaagaaaagacgcgtaagaaatcagaacaattgctataaacttttaatttcataatgctatataaataggagagggcagaagaatctgttctctcctaaagtagattttacgctgctgtgaacagtaacgtgtcgggcagtgatttatttttggggaagagtcagatgaaaaagattcgggttatattttgtgttattatattcataacgggattgggaatcgcatcgtatccatttatcagtaacatggttgcgcagcggcatgccagtcaggttgtgaaagattatgagacaaatgtagaagaaatggacgaagagaagattgatgcaatgaaggaagcagcgaagaaatataatgagcagcttagcaatgttgtatcagtggatgatgaaaatgaaaataatgagcagggagagagttatgcagatcttctgaatatcggtgaatcgttagggtatattacgattccgaagattgatgtgaatcttccaatctataacggaacgagtcaggatgtcctttccaagggtgtcggtcatatggagcagtcttcgtatccgcttggcggagtgagtacgcactgtgtgttgacaggacacaggggacttccgagtgcggtattatttacagacttggacaagttagagatcggggatgaattttatcttcatgtattagacgagattcttgcatataaggtggatcagatcaaggtagtagagccaaatgaatccggtgacctggagatcatcgatggaaaagattattgtacgcttgtgacatgtacaccatatgcgatcaactctcatcggcttttagttcgtggagaacggacggaatataaaggagaacaggataagcagacaaagaatcagatgcagacaggcgctttgacgaagcggattgttgatgtatggccgtggcttctgggtgcatttcttgtcgcagtgctgattgaaagcggtatctttttctcgattttaaaacataagaaacaggacatggaggagtaagcaatggagtattatgggaagctgcagaaagcgattgatgccgtagagcatgtgattattggaaaagatgaatgtgtggagaaaatcatggaagcaattcttgcaggaggccatgttctggtggaagatattccgggagtcggaaagacgagccttgcgcttgcatttgcgaaggtacttgatctggaacagaaccgtgtccagtttactccggatgttcttccggcagatattacaggattctctctttataggaaggaactcggaagttttgagtatcaggaaggtgcagttatgtgcaatctgtttctggcagatgagattaaccgtacttccccaaagacacagtcggcgcttctggaggcgatggaagagcgaaatgtaacagtagatggaattacacatgtgctcccggaaccatttcatgtgattgcgacagagaacccgattggatctgccggaacacagatgcttccggagtctcagcttgaccgttttatgatcagtctgcagatcggatatccggagaagcaggatgaattaaagattcttatgagcagagacaggacgaatccgatggatgcgcttcagccggtaatcttccgggatgagttgaaagagatgcagaggctgaccgaagaggttcgaatccatcaggtgatctatgaatatatcattaaccttgtggatgcaacaagaaagaatgaaatgatcgagcttggagtcagtcctcgaggtgcactggcacttgcgaagatggctaaggcatctgcatttctctcaggaagaagctatgtgattccgaacgatgtttcagatgtatttcgtaatgttgcggagcatagaatccgtctgagttcgaaagggcgtctgaatcacctgaccgcagagaaagtgcttggtgaagtgttagatactgtgaaaaaaccggtgccgcagagacgataaaatctatagaatgaagtaggacaggcatatgagaaataaaaaaatatatggcggaatcttatttgtgacgcttgtgattgcgcttttctgggaatcagctttgatccggacacttttcgcatatgaagtgttgatgcttccacttctctttcttcaggctgagtattttgcgagaaatctcgaattccggttgcacgttccggtccggtatgtacagaaaggacaggaatttgcggtggaagttgaactggaaaatcattctttcatgccgatggaatcaattcctgtagaaatcagctgtgagaatgaatttacaaaaagcagattcggcgcaaaggatactgcgatggccgaggcaaggaaaaaagtgcggttacagtttttccttgaagcgaaatattgtggcagagtgaaagtgtctgttgagaaggtgaaggcacaggattatctgcggttgttttcgagagggagcgagaagaaatatcaatccgaagaagtgatggtacttccgatgattcataaaataccggtgcagcaatcatttcaactggaagaaaatctggaaggacagctgttttcaaaaaatagaatcggtgaggatacttcagaagtatttgacatcagagaatatcgttcgggagatacttctcacaggattcactggaaattatctgcgaagacagatgattttatggtgaaggaatatagtctgccaatggaacgcacagtattgctttttcttgatctgcatattggaaaagaagaaaagtttacacagcagaagctggatcattttcttgaaatcctggcttcactgtcatggtctatgcaggagcagaactggcatcacaaagtgatctggtgggatgaacagaatcagatgttaaaggaagcggatgtttcttcggaggaagaaacctttcgtatgttagaacagatctgttcctccagagtatattcgaaagcatatgagattcaggaattatatttccggcagtttggcgagcggacagaagagctcggaatgcagcttgatatttcagggaaactttatcatggtggaagatgtataaaagtattccgacaagagaaactggaagaggatttaatggaatgggaactggaactgtaaagaggaaaaatacaaatcatacagaagagacaggaatccgtgtggtacgcagacggattctacaggaagatccgcagggagacagactttcttctgcctcgttctggtggatgacgggactgtgctttctaagtgcagtagctctttgtatgctgtttacaaaagcattttctattacatttgcaaaatggctcgtttatccggcgatgcttgtgtactgtgttctctttacattatattatgaacaaagacggttgaaaaaatactgcgtgtttctctttttaggagttgtttttgtgctttgtctggtcatgtttctgatacagaaggagttgatggcaagcatttcttatgtgtggatgcagatggcagagcagttgaaccggtcttatcagggagatttgagtgtgccatcaggagccggaaattctgcgacactgtttttcctttttttgttccttggtgttgtgtggattcttgcacagggaatgatcaagagacacgagaaaggatattttctgttgatcacatttcctgtgttactggttgttctgctaagtgggggaaatgtatcgaaagcagctctttttctattactccttagtttcttgtgcatcacggcagcatccggaatccgtgtgagaaagaagttctggggcggagaagagagcgaggcatttcgtcagaatctccgggcggttcgaagaattcagagcagatcctctgtcgtgtgtatcgcagcaggaacgattctgcttctgacttccttttacctgcttggaccggttctttcaaagccaatcgtgacgttatcagatgtatcagcgcctgtgaaagttcatggaatgcagttcctctatgatttccttccgaaaatatcaggtggtaagttgaatctttcgcttgaaggggtcggaggtggtgtctcggacggagaattgggagatgtcgaaggatcttcctatgatggaatcgaatccatccgtgtgacgacatctgcacagccgaaagaggttctgtatttaaaaggatttgtcggatcagaatataccggagacagctggaaaccgggagatgaagatgcattgcaggatgcggctctcaactggaaaacagaaggaaattcccttctctatctgcagaatcttccgtttttgcgaatgatgtatacgcagacacagcagccagagcagatgacggtagagagattgaatgcaaatacaaagtatacctatgttccatatcaggcttatctgaacgactattatgagatgatcggcggagatggttcagttgcagggcagacagcgcaggatgacagttatgcatggtttccggttacagatttccagaaggaaatgacagagtgggcaaagcaggatgatcagcaaagtgtacttgacgaagtggagacttcttatgaggtatatgtagaaaataattatgaagatgttccttcagatctgaaacagctgaagaaaatgtgcaaggagaaaaaagcagagtggaaaaagaaaatgagcggagatatcacacaagagcagaaggatgatcttgtcagtgagcggatcacggatgtgaagcagttcataagacagacgctctggaaacaatgctccttttcagaatctgtaaaaaagctgccgaagggagaagattatgtagaatattttctgtttgacaggaagaaaggagattctacagcattcgcttccgcagcggcgttgatgttccgtgagtgtggagttccggcaagatatgtagtcggttatgcggcaccggcaaacttatttacggaaaacagtgaggggaattactcggcagttctccaggatgacaatgcacatgcatgggtggaaatctatgtgccgggtgccggatggatgccggtggagacaacacctggatttgacggaacgattgagaatgttgaaagtaccgatgttcagacggattcagtgaaggatcagaaggacaaaaaggaagagaagaaaaactggaaagaggaagcgggagatctttttaaagatacaaagaaagctttcagtggcaaaacagtagaaattgtgagcggaattcttctattcttactattagtcgaggcaaggagacgttggatttccggaagaagacggggcaacggaagaaaattgtcgaaggaacagaaggtaaaagaaattttctgcagcttctatgaagtgcttttgtttggtggatttccacaagatgtggatacaacggaagaagaatttgaaagagaagttgcactgcgttatcaggaatttacggagaaggagttggaaaagttcaggactcttgttcttcaggtgcattatggatatgaggaaatctcagagcaggatgtacagtttgcacgagacgagtatgagaagcttgtaaaggcaacagtaagacagatgaagttcagaaagaagagcgtattttatatatggaaaggattctgatgagagaaaggagcgtgggaaaatgaggaggctggcagcggttctctgtgtgttgatctatcttggcggtgtaattgtatttgcgtggccggatcttaacagtttaaaaacaggatatgagaataagaaagtgatggaacagttccaggatcagacagaagcagaacaaagtgtatcgaatcagacagactctatctctgccgattccaaccagattccaaagaacgcccagctctaccaggagatgcaggcatataatcagcagatcttttcagatggtcagtcaggactgactgatccgtggtcttacgagcaggagacattggatctgtccgagtatgggattgatgacgggatgatcgggattcttgatattccgaagatggatgtgacattgccgttatatctcggcgcaacgcaggagaagatggcgagaggtgcggtcatgcttggacagacttcatttccggtgcagggtacagacagtaattgtgtgatcgcagcgcacagaggatggaagggaattccgatgttccgcgagattgagcggttggagatcggagatgaattgacgatacaaaactgtcaggaaacattgacgtaccgtgtgtctgagattgagattatcctgccggatgagagtgacaagatcatgattcagccggggcggaatatggtgactttgatgacatgtcatccttatacgcagaattccagaagatatgttgtgtattgtgatgaggttggaacacagccggaggcagcagttgatgcagcagaagaggcggacagcagccagcaagagattatcaccacttccgagcagaacagaacggaagcgatagaggaagatcagcgtctgatcgagagagatacgttatggaggaaagccggttatgttggaatcgggttgatcggagtattaattatttttggatttatccctaggaaaaagcactgatttgcgttatactaagaaagatgtgaatgaaaacatggtacaaaggagatggagcaatgattcgttttacatggtatgaactgctttggctgtttttcatctattctttcttaggatgggtgctggagacagcggccgcaacagtaaaacagaagaagtttgcgaacagaggtctggtgaatggaccgttctgtgtgatctacggtatcgccgctctgttcatgacatttggattacaggagctaagaggagtctggctttttttatttgcaacgatttatgctacagtgatcgaatgggttgcagggcatttgatcgagaaggcatttaaagccagatggtgggattactccaggattaaatggaatctggacggatatatctgtatcccggcttctcttatctggggtgctcttggatatctcggaatccgctggggaaacagatttgcaatcatagtatttaaaatgttacctctgttcctgatgaagatccttgtattggttcttcttggcgtattggttgtggatatcctcggatcttatctgctacttcgtggaaaaggaaagaacctcgcgcggtgggaagctacgaatgaaggtctggataaagtcagcaataagcttggaagtgcgatttccggatgggttgggaaacgtatccaaaaagcgtatccaaaggcaatggaactgatccgcaaggaagaagaatcggagaaggggaaagtatttgccgcaggctgtgggttctataagattgtgctgttgttttttgtaggagcatttcttggagacattacagagacgattttctgcagaatcacggcaggtgtgtggatgagtcgctccagtgtggtctggggaccgttcagtattgtctggggactggcgatcgcacttgtgacagcaatgctttacaaatataaagataagagtgacagcttcttatttatcatcggtacattgctcggtggagcgtatgaatatctttgtagtgtgtttacggaaattgtattcgggaaagtattttgggactatagcgagattccatttaacttaggaggccgaatcaacttattatactgcttcttctggggaattgcagcagttgtctggtttaagaagatttacccatatatttccgcatggattgagaaaatcccgatgctgacagggaagatgcttacctggtttttgatcattttcatggtctgtaatgtggctgtgtcatgtattgcacttgttcgttatgacgaacgtggaaagggcgttgtagcggaaaacagcattcagaaatgggcagatgagcattacgatgatgcgaagatggagaagatttatccgaacgcaaaagcgacagaatagaaaataagatgtaaacgagagggaaatggtatgatggagaataaaaagatgcgggctgagcatccgaagaaagagcttgcagtggatattttgtatgatattataggaagtattttgtttggtgccggaatctatacatttgcagagggaggaaattttgcgcctggaggaatttcaggtattgccttgattatgaacaagttatggaatcttccggtcggtacaatgacgctaatcctgaatattccactggtcatcatcagttacaaaacagtaggaaagcggtttttgatgaagactgcgaggacaatgattatttcaaccatttttgtcgatcttgtatttccgatgttcccatactatacaggacagcgtctgcttgcagcgatttactcgggagcattgcttggacttgggatggttcttttctatatgagaggttcttcttcgggcggagcagatttcctgacgatgacgatcaaaaagaagagaccacatatgtctcttggtcgactgacgttgttgatcgacttgatcattattttaattggatggccggtattcggtgatgttgactcagttctttatggattgatcgcagtatttgtctgctctgtggtaattgacaagattctttacggaatcggtgcaggaacacttgcaatcattgttacatcgaagggagaggaaacagcggaagagattggaagaatcaccgaccgtggtgtaacatctttggaaggaatgggtacttatacaaagagtaagagaaatgttctgctctgtgcatgttccaagtcagaagcgtatcttgtgaaaaatgcagtttaccaggtagatgactctgcgtttgtaatgttcactgagacgagtgaggtgcttggagagggattcaaggaaagtcttgatgagctgtaaataaaagagaagaatatgaaatgtaaaaagctgctgtctgaactgttgcttgcgggactcgtgaacaacagacggacagcagcttttctatatgctctttatgcagaaattcgttttcaaagatataaaaatgttaatcttctttcgcccagtcgaaggaatatttgacagccttgtgccagcctttcagtttcttttcgcggacttccggatcaatcgaaggttcaaagatctgatcgatcgcccagttctctttgatttcttcaagactgttccagtagccgactgcaagaccagccagataagcagctcccatagcagtcgtctcaacgcagaccggacggtggacaggtgcgttgatcagatcagcctgtgtctgcatcaggaagttatttgcgcttgcgccgccgtctactttcagggaggcaagattaatgtcggagtctgccttcatggcagtcaggacgtcatatgcctgataagcgagagattcgagggttgcacggatgatgtggtatttatttaccccacgtgtcagaccgacgatcgttccgcgggcatactgatcccaatatggagcaccgagtccggtgaaagcaggcacaacataacagccatttgtatttttcactttctttgccatatattcgcagtcgtcagcggaatcaatcaggcgcagttcatcacgaagccactggattgccgcaccggcgacaaagatagaaccttccagagcatatgtaacctttccgtcaagtccccaggcaatcgtggtgaccagcccattgttggaaaagacaggtttctctccggtgttcatcagaaggaagcatccggttccgtaagtattcttcgcatctccaggtttaaagcaggtctgaccgaaaagtgcagactgctgatctccggcagcaccggcgatcgggatcgctccgccgaggacggatggatctgtctctccgtaaatgcagctggaaggcttcggtgtcggaagcatacagcgtgggatctgaagttcttcgagaatctcgtcatcccagtctaatgtattgatattgaaaagcatggttcgtgatgcgttggagtagtctgtaacatgtactgcgcctttcgtcagtttccagatcagccaggtctctactgtaccaaagagcagttctccgcgctcggcacgttctcttgctttcggaacgttgtcgagaatccagcggatctttgttcctgagaaataagcatcaagtacaaggccggttttctgacggaacttttctgtcagtcctttttccttcaaagaatcgcagaattcagcagtacgacgacactgccagacaatcgcgtggcagataggatcgccggtatttttatcccacacgatcgttgtctcgcgctggttcgtgataccgattgcagcgatatcagaaggttctgcgccgatgatgttcatagcctccacagcaactccgagcatgcttgcccagatttcatccgcatcgtgctcaacccagcccggtttcggaaaatgttgtgtgaattctctctgtgtgacgctgcagatttccccttttttattaaataaaatgcagcggttacttgtggttccggcatctaatgccataacgtattttgacataatatgtgcctcctcattctagtattactcagaacagaaatggttgctggtcgcacatcgtgtgaacagtaaccagaaatgtgataatcgaggttcgttctgttctatattctaataagataagaatatcataatcggaatggaggttcaatggacgaaaggtgctgtaataactaaattttcgcattttactgtattttactgtatgcatgcttgcaaatctttttatgataccgtaaaataaattttgaattgcttttcagcagttcgccttatgcaactaataacgatacagagacattagaaagttttattttcttatgcatttttataataagaaaggcggtatattccatgggaatgatacgtgctgaaaagcttgtatttgaatatgataaacgagacgaagaaggtaatgtgatcggatcccatcgcgccattgacggagttgacattgatgtcccgcaggggtcttttgtggcgattcttggacacaacggttcaggaaagtctaccctggcgaagcatatgaatgcgattcttgtcccgacaggtggaacgatgtgggtggacggaagagatacgaaagatccgaatgagctttggaacatcagacagagcgccggtatggtatttcagaatccggataaccagattatcggaactgttgtggaagaggaagtaggattcggtccggagaacttaggagttcctacggatgagatctggaaacgggtagagaacagtctgcgtgcagtcggtatgctggagcgcagaaaggattctccgaataaactgtccggcggccagaagcagagggtggcaatcgcaggagtgatcgcgatggagccgaagtgtatcgtgcttgatgagccgaccgcgatgcttgatccgaatggacgaaaagaagtgatcgaagcggtagagcagcttcgaaaagagaagaatgttacggtgatcctgatcacacattatatggaagaagtgatcgatgcggatcaggtatttgtaatggatgaagggcatgtggtgatgcatggtacaccgaaagaaatcttcagccaggtggatgaactcaagaagtaccgtatggatgtaccacaggtgacaatgctggcagacgcattgattcaaaaaggagttccgctgccgaaaggaattcttagaagggaagaattggtggatgccttatgtcaattaagttagaaaatatcagttatgtatatagcccgggaactgcatatgagcatcatgcgctgaaggatgtcagtcttgagatcccacagggacagttcgtcggaatcattggacacacgggttcgggaaaatcaaccttgatccagcatttgaacggtctgatgaaagcaacctcagggaaattactttatgaggggcagaacatttacgaggacggatatgatatgaagaaactgcgtacacaggtaggacttgtgttccagtatccggagtatcagttgtttgaagttgatgtgttaagtgatgtgtgttttggaccgaagaaccagggactttccaaggaagagtgcgagaagcaggcaagagaagccttggagcttgtaggatttccggagaaatattataagcagtccccatttgaattatccggaggtcagaagcgtcgtgtggcaatcgcgggaattcttgcaatgcatccgaaggtacttgttctggatgagccgacagccggactggatccgaagggacgagatgagatcttagatcaggtaaaattgcttcatgagaagaccggaatgacagtaattcttgtttcccatagcatggaagatgttgcgaaatacgtggagcgcctgatcgtgatgaatgatggagagaagatgcttgacggtacgccggaagaagtgttccgccattataaagagcttgaggctgttggactggcagcaccacaggtaacatatgtaatgcatgatctgaaagaaaaaggatttgatgtatcagcagatgcaacaactgtggaagaggctgcggacgagatctacaacttcctgaagaagagacaggaggtgcagtcatgatcagagatattacgataggacagtattatccggcgcagagtccgattcacagactggatccgcgtgtgaagattgtctgcacactgatctttttgatttctttatttgtgcagaacagtgtgcttggatatgcattggcatttgtatttctagcgtgtatgattcacgtttctaaagtcccggcaaagtttatcggaaaaggacttaagccgattgtgatcttgttattgtttacagtggctatgaacttgttccttacaagaggcggtgcagtgttattccattggggaatcattacaatcacagagacaggacttcgtacttctgtgttcatggcagttcgtcttgtattgcttgttgcaggatcttctttgatgacatttacaacgactccgaacggactgacagatggactggagaagctgcttcatccactgaaccgaatccatgtaccggtacacgaaatttcgatgatgatgtctattgcactgcgttttattccgattctgctggaagagacagacaagatcatgaaggcgcagatcgcaagaggagctgattttgaatcaggaaatattatccagagagcaaaggcaatgattccgatccttgttccgcttttcgtgtctgcgttccgaagagcgaatgatctggcgatggcaatggaagcccgctgttatcacggtggcgaagggcgtacaaagatgaagcctttgaaataccattatcaggacagacttgcttatgcaatcacattgggatatctgatcgcgattgtagtgatcggaagatttgtgccgtttaaattgtggattttttagaataaaataaatagagaagagggacggatatttctgtcccttttatttacgcgagcaacgagtcaaagtccgtgcttgcacgagaccttggcgactgccgcgataacttgagaaactcgcggagcgtgtttctcatagtataggagaaagaacagatatgagaagaatcagattgagagtggcgtatgacgggacagcatactgtggctggcaggtgcagccggaagtgccgacgattgaaggtgaattgaatcaggcgatctccagacttacgaaggaagagattatcgtgatcggggcaagccgcacagatgccggagtccatgcgaagggaaacgttgctgtatttgacacagagtctacaatcccggcagaccgatttgcttatgcattgaatccactgcttccggaagatattgtggttgtagcttcggatgaagtggcagcagactggcatccaagacattgtgatacggagaaaacatatgaatacaagatcttaaatagcaagtttccggatccgatgagaagaagagatacgtatcatgtttcatttgacctgaatcttgagaagatgagagaagcagcaggatatctgaaaggggaacatgattttaagagcttctgtaatgttcatactcaggtggaagatacggttcgcacgatttatgatctggaagtagagaaagaggaagagcttattacaattcgtgtccgtggaaatggattcctttacaatatggtcagaatccttgcaggtacgttgatcggagtcggaagaggagcaattgccccggaacagattccggccattcttgaggcaaaggatcgccaggcagcaggaatgacagttccaccacagggactgaggcttgttaaaattgactaccttgatgaaaaaagcaaataattttttgtaaaggttgacaatgaaccgtttcgctgttagactagacagtgtggtgattgtcagtagacagaaccaaatttcaggcagagacgaattttaagcgtatgtctgaaatttgtttttgtaaagaataacgaaaaaaatcgcgtattatgtaaaagtataaaaaaaatataaatattattaacaaattataaaatatttgattgacttttatgtgcaggtttgttatactgaatcacgtagaaaagagataacattgacgaattgttatcattaaagaaggattgttactgttaggcaggcaaaaccagattttatgagcgtcaccgaaggaatcaagggggatgccttaaagtttggcttttttattatgagggagtttttcccaaagttagagaaaggccaatcggatggttatagacaaaataattaataacaatattgtatctgcatttgacgaaaaaggcttagaagttgttatcatgggtcgcggaatcggattccagatgaagcggggacaggaagttcctgcagagaagatagagaaggttttccgtatcaagagtcagagcatagcagaacagctcaaggaattgctggcgaagatgccgcttgagcaggttcagatctcgaacgagatcatttcctatgcaaagaagacaatgaagctgaagttaaatcagagcatctatgttacattgacagatcatatcagttttgcaatcagccgctgtaaaaaggggattcatcttgagaatgcgttgctgtgggagattaaaagattttatccacaggaatttgaactcggaagatatgcggtagaacttgtgaaaaaaagactgaatgtagagatgcctgaggacgaagcaggatttattgcattacattttgtcaacgcagagtatgggactgatattcgggatgcagtacggtttccgaatcagatgaaagagattcttggaatcgtagcagaagaacttgggattgagatggatgaaggctcattgcattatgaaagatttctgacacacgtgaagttccttcttcagaggatttaccgcaaggagttacttgaagaggaagagaacgagattacagagatgatgcagagaaagtatccgagagagtattcttgcagcagaaaagttgcagattacatagaaaagacggcagactgcaagctgtcaggagaggaagttttgtatctgacactccatatccgccgtgttgcgatggcggattcggaggacgaatagagggttgctttgaacggtaacgaaagaaatggctgtattagggaacagctactgtaaaattggactttagcgcaaggcgcttttgtcatagatggttctctgctttgtggaagacccggaggatcagagttgattttgaccggaggactcatttgccggttaaaataaaaagggattaaaaatgagagattattaaggagggaattctatgaaattcgtacagaaattaggaaaagctcttatgcttcctgttgcttgtcttccgatttgtggtatcctgatgggattaggatacgcaatgtgtccatctactatgcagggtggagatgtaactggtgttgttgagcagatcggatttttccttgtaaaagctggtggtgccttgatcgatcatatggcactcctctttgcaatcggtgttggtgttggtatgtctgatgaccatgatggtacagcaggtcttgctgcacttgcatcctggctgatgatcacaaaccttctttctactggagcagtatctgttcttagaacactggaagaaggatcaacagcatttatcgcattcagcaaaatcgaaaacccatttatcggtatcatcgccggtatcatcggtgcactttgctacaacagattcaaatcaactaagcttcctgactggctgtcattcttcagtggtaagcgttgtgtagcaatcgttgcaggtgttgtttctattattgtatctgcagttctgctctttgtatggccggtactctttgcaggactggttgcacttggaaaaggaatcgaaggaatgggagctcttggagctggtatctatgcattctttaacagattacttatcccgttcggtctgcaccacgcactgaacaatgtattctggtttgatacaatcggacttggagacctgtcacacttctggaatggagaaacatctgcagacgtttcctggagtcttggaatgtacatgtcaggattcttcccatgtatgatgtttggtatccctggagcagctcttgctatgattcagtctgcaaagagcaataagaagaaagttgcaatcggacttatcgcatctgcagcaatttccgcattcgtttgtggtgttacagagccattcgagttcgcattcatgttcctcgctccggcactttacgttgtatacgcattactgtatggtatctttacagtaatcacagtagctcttggattccgtgcaggattcagcttctcagcaggacttacagaccttatcttctctgctccccttccggcagcagctaagacatggcttatcattcctcttggaatcgcagctttcatcgtattctacgttgtattccgtttcgcaatcgttaaattcgatctgaagacaccaggtcgtgaagatgacgatgatgatgaaacaaaagttgttcttgcaaacgatgacttcacaacagtagctaagatcgttcttgagggtgttggtggaaaagataacgtagagtctgtcgacaactgtatcacaagacttcgtcttgtaatcaaagattacacaaaggttgatgagaagaagatcaaatctgcaggtgttgcaggtgttgttcgtccatctcagaaagacgttcaggtaatcattggaacaaaagttcagtttgtagctgacgagttcaagaaactttgcaaataagtttaaatgataattaggttatccgggataatgatgtgaaagaatacggataacacacacattaataatcccttttcaaaagcggaagtggaatcggcgaagagccgggacacttccgtttttatatattaggaaagttctttcctaatatataaaaacgctccgctagggatgcgcactgcggcgtacaaggtaggtgtcgcaagcgaccgccgcaggcgccagaatgtgccaaggcacattctttgttatatatacaagactacttgacaaaaggattacaatagtctatcatcaagactacgagagtttattctgactcttatatagaagttatatatggaaggctgtgaagggaacaagtaacagacagaacagacacacagaaagctgccggctgatgagaggcgcgtagatgactgactgcgaatacatcctggagcttcacaccgaaatctgatgatggaaattcatatctaattactagaatttaaattcatagattgatatggggaacagatcagacagagagtaggctgtgacggagttgtgctcgttattgcacgaatgagactgacagacataaaggtaagaattttatacttacatccgaaaaaatgttgtcggtgaattaaggtggtaccacggtgatagatcgtccttattgcgtcatgcagtaaggacttttttatatgttaggaaagttcttttcggatatataaaaaggccaagctgaatgatgcgttataatgctactggtcacagtttttgtgccaagagacatgttatgaatattctgtagaagttacagaaaaataaaacgaaaagagaaggagaaggaaaatgggaatttatgaagaacttcaggcaagaggcctgatcgcccaggtaacagatgaggagagaatcaaagaacttgtaaataatggaaaggctacattctatatcggattcgacccaacagcggacagtcttcatgtaggacattttatggcactgtgcctgatgaaacgtctgcaggaagcaggaaacaagccaatcgcactgattggtggtggtacaggatatatcggagatccatccggaagaactgatatgagaagtatgatgacaccggagcagatccagcataactgtgactgcttcaaagagcagatgagccgtttcatcgatttctctgatggaaaagcgcttatggtaaataatgcagactggttgcttgatctgaactacatcgatgtacttcgtgaggtaggacctcatttctcagtaaacagaatgctgacagctgagtgctacaagcaaagaatggagaaggggctcagcttccttgaattcaactacatgatcatgcaggcatacgacttctatgagctgttccagaactacggatgtaaccttgagtttggtggagatgaccagtggagcaacatgctcgcaggtacagagctgattcgtcgtaaacttggtaaagatgcaagtgctatgacaatcacactgcttctgaactccgaaggtaagaagatggggaagacacagtcaggtgctgtatggcttgacccgaacaagacatccccattcgatttctaccagtactggagaaatgtcggagatgctgatgttctgaaatgtatccgtatgctgacattccttccacttgaagagatcgacaagatggatacttgggaaggtgcacagcttaacacagcaaaagaaatccttgcatatgagctgacaaaacttgttcacggtgaggaagaagcgaagaaagcacaggagagtgcacgtgcactgttcagccagggaaatgctgataacatgccgacaacagaactggaagaggcggatttccaggatggaaagattgatatccttgcagttctcgtaaagagtggacaggcatcttccagatctgacgcaagacgtgccgtaacacagggtggtgtttctgtagacggagagaaagtaacagacattacaacaacatatgctccggcagacttcgatggagaaggaaagatcgtgaaaaaaggaaagaaaaacttccgcagaattgttgcaaaataattgaaatgaagtagagaaatagtggctgttactgtagcattaagttggatacagtaacggccgcttcttataaggaggaaacaaaaatggcatttaaagaagtaaagattgaggaactttcatttaacccttttacaaagatcagcaaggaatggatgttgatcacagcaggagatgaagagaagcataatacaatgacagccagctggggtggtgttggaattatgtgggggatgaatgtggctacagcatatattcgtccgcagagatatacgaaggaattcgtagatgcagaagagatgtttacactttctttctttaaggaagattatagaaaagcattaaatctttgtggttccaagtcaggtcgcgactgtgataaagataaagaagcaggtctgacaccgtattacacagacggaacaacagcgtatgaagaagcagatctgatctttgtatgcagaaagctttatgcacaggagatgaaaccggagtgctttacagtagacggaccggatgagaaatggtatccgggcaaagactaccatacgatgtatatgggtgagatcgtgaaggtgcttgtgagagaataagtaaaagatttcagctggtcagattatgaagtcgaagagccggaacaattaaaataaagagtagttacactgcttgcaaataataggagaactcctttcagttgtgataagatgcagtctgagaggagttttttgtagaatagagtaaataaaaatgctgtacaacttgaaaatcttgataaaatatggtaaaaatagatatagaaaataccaggaaagcgggcggtagaatggaagaagtaaaaacaataatactgaaggatgtattgccttttgtggatccggtggcaagatcccatgcgagaagagttctgaaagatgcagaaggatacaaggagcttgtgattgatttccggggaattgaattcatggggcgcggttttgcggatgaagtgttccgtgtgtttcaggaagagcatccggagataaagattacaccgcttcatgcaagcacatccatgttagcgatgattcgccatctcggaggaaaacaacaataaatgatatttacagattccttgtaaaccgttacaataggaagtcggggcgtttgtctctgatatctaattttatagaagaaaaggaacaaggaaaatggggatttatctgattgtatgcccgctggtgtttctggcgggctttgttgattcaattgcaggaggcggcggacttatctcgcttccggcatatatgtttgccgggattccggtgcataatgcaatcgcgacgaacaagctgtcatcttcaacaggaacggtagtgtcgacagcgagattgattaagaataagaaagtagactggggattcgtacccggaacggtgatcggagcgttgactggttctgttgccggagcaaatctggcgttgattatcagcgaccatattttgaaaatggtattggttgttatcctgccaattgtagctttctgtgtgttgagagacaagaacatggatgtggaagttccggtcggaatgacaaagaataagcagtatctgatcgcaattgcatgctctttggtgattggttgttatgacggattctacggtccgggaacaggaaccttcttgctgcttgtatttaccaagcttgcgaagataccattggagaaagcgacaggaaatgtgaagattgtgaatctttcttccaatatttcagcgctgatcacatttatcctggcagggaaaatcctgtggggactgggactggcagcatcctgtttcagtatcgcagggcattatgtaggtgccggaatggttgtgaataatggggtgaaagtgatcaagccgattattctgatcgtgctggtgctgttattggttaaggttgtgtctgggatataagtaactgttcagagccaagcaaaattaaaaaaaacaggtataaaaggcttgcatttttaaggatgtttttgaaattttatttggcggatacgccataccgacgaaatgcgtagcattttggaggttggctctgaacagttacgaatataataaggaaataaaagaagcagaatcgtgtgggaaaatgattctgcttctttgtgcataggcttaacttttatacaaaataacataaatttgtcaatttttataaacattataatataatactcacatcaccaatctcagcactcttgtcttatccaatataaaaatcgaacataccataaaaagatgcgccagcagcgtgctgacgatcacaccgttagacgtaagcaggaatccggtatagaatccaaaccagcagacgaatccggagtaacttgccatcaggataagcagtggcaattcttcccagaagccgtgaagtgtgcttaaaaagtcatccattgtaaaatcgaagtagataaaacgaccaactgcaagcgtgatgaagtacatcatcagtgaatcgtagttgtcatcattgtaaataaacttaatatacagaagtatcagtataatataaaaggaagataccaatcgaatggatgccttctggttggaatctatttcttccaatggtacaaatacaatatcaagccatccatttaagataacggagaagcaaaggaagagtaaaaggataatatcctgatacttctgccaatagatggacacgcctggaatcctctcgtcaataacatagtaaagagacagaaagatcagcacggaggtgctggcgaagaccatctcaaagaaactttcaataatacttctttttcgctcctgatggtggcggttgatacgacggattgctttgtgagacagggagtcatcctgcagtcgttggcgtgttttcaatttggctacgccaagaacaataccaatcacaacggccagcccgatcagcgagacgagcaggtagattccgatgtattcaaagttaaagtagtgtgtaacataagttctcattaaaatgccttctttcaaaatccttagcagatggtaaatgtttctaaccaccttaattttaattatagcacggtgatgcaagggataatcaggtttatggttagcgtatacttataagatttataaaatagtggacaaaattgaacctagtcaaacaaaataaactatgttagactatcaatagattgataaaaagataacaagcatggtatctgtcagaatggattgccagtcgtatgtagtgcgagtagtaaccaaagcagtttaccagggagtggaaaaaggacaggatgagaataatgaaagcaattgtattcgatgtagacgacacattatatgatttatcaactccatttaaggaaacatgcagggaggttttcccggaagataaagatctggatctggaaggcgcatttttggcaagcagaagatacagtgattccgtgtatgcacgctgtttaagtggtgagatgtcgatggaagagatgtatatctatcgattcaaaaatgcatttcttgattatgggaagaagattgatgcactcaaggcattggaattccaagcaatttatgaagaaaaacagcatgaaatcaagatgacagatgcaatgagacagttgatgcagaacttgaaagagaaggtaactttgggaatcgttacaaatggtccggcgcagcatcagtgggacaaagtgaacgcgcttggtgtaacggaatggattccagtaggtcatgtatttatatcaggagcactcggggtagcaaaaccggacaagaggattttcagtcgtgcggcagaaagaatggggattttgccgcaagagatctgctatgtaggagattcttttgaaaatgatattgttggggcaaaagctgcaggatggaatgcagtctggtataatcatcgcggacatcaggcagcaggtgatgtaaagccgaatgcagtggtaagaagtgaggcagaattgattgcatgtctggagaagatcagcacaaaggagtgagcggaatatgcagaaggaagcccaaataatcaaggtgatgtctgctccggaagctggatggtaaaagaaaaccttttaaaaaaagaaaaataacagctgtaagagaaattttttttcaattacagctgttatttttcttttttattcttttattcttctactttttcacttttatctttcggcagaatcagactgagcagcagtgatactacgaacacacctgcaacagcatttccgttgaagatatctcccacagcctgtgggaaagcgctgaagaagttcgcatctgtttgtgtaaggaccaacgccgacgcagaaagcgagagatacaatgatcattgtgcggtcattgaactcgcagtctttgagcatcttgattccttcgtacaggattgaaccaatcttccatattggatagttagacagcgtctgcttcttcattttttccgagtctgcgaagcattgtcttcttgactgcacggaaaatgttttcataacctgtgcagcggcacagatgaccggacatcattttacggatctcatcatctgagaattctttgccggcatttaaaagttcagttgcactcatgatgaatccaggtgtacagaagccacactgaacagctgcttcatcaataaatgcctgctgaatatcggataactcaccatttggtccggcgagaccttcaagagtaaggatttcttttccctcagcccatacaccgagatagatacaggagttgaagcattccccatcaatgattacattgcatgctccacattctccaacttcacagcctttctttacgctggtcagacggaagtcatctcttaaaacatctgtaagtgatgcacggacatcgatcattttctcgactttcttaccgttgatcgtgcaggtaagtaatttgtactgtttattcatcgatcacacctcctgccaatctgatagattctgtcagtgcacgctctgcaagaacagtagcgatgtgctgacggaatgccttggatgctctccagctgtcacgtggattgatatcttccagaacagcctgaccaaattcatgaacaacagcttttgtaagcggtttgccctttgcttttgcctcagcagaaggcgcacgcatcggaacaggtcctgcaactccgtaagcaattctgacatcctcgatcgtcttcttatcctcagagagttttacattgacagaacatcctgttgttgcgatatccattgcattacgcattgcgtatttaatgtaatgtccgtggtagccttcgtacgcttccttcggaatgatgattgctgtctgaatctctgccggtttcagatcaacgactcctgctttaatatagaagtcatggatcggaattctgcgaactccgtccggtcctgtgatctcaacaattgcatcccatgcatgaagtgttgaagcggaatcagcggatgtaacaccattacatgtgtttccaccgatcgttccgatgttacggatctgtggtccaccaaccatatcaacagcttccccaagtacgttgatatgcttctggatgatcgaatcctttgtaatatgagagaagctggtcagagagccaatgcggatcgcaccgtcttcttcataagatatgctgctctcatttcatcaattttataaatgcttacaagttcttttcctgcgcggcgtccttcacgcatctgtacaagaacgtcacttccgccggcaatgatctgtgcttccggatgttcctgtaaaagctgtatagcatgagctacgctttcagcttcataaagtgctttaagatcatacatttgcttctcctccttcctcaaacatatgttgttccttcatactgcggaacagatggtgtggattcaccggtgcatcatttacatagacacctgttgcctgataaactgcgttacggattgcaggtgcaatggaacatgtcggtggctcaccaagagattttgttccgaatgcacttgtaggctccgcattttctacgaaataagcacgtagtctcgggtgatccataaatgtggataacttgtaatcgagcaagttattatttaatgctcttccggtcttcggatcaaagagcaggttttcagaaagtccgaatccgattcccatactcataccaccgtgtacctgagcttcagcaagtgccgggttgataagagttccggcgtcatgtacattgacgatatcaagcagtttcaccttacacatcgggatgtcaacttcaacttctgcaaatgtacatccgaaggagtaagcattggacttaatttgtgctgtactttcagctgacagatgctcactgtgtgaaaggctgtaaagtgcttctgttgaaagatctccaagagacatcagaacacggttatctgtgatacgaacaatctgtccgtcaatgatatccaggttatattcaggcattcttgtcagttcatgcgcatatttcaaaatgcgttctttcagaagcagtgctgtctggcgaattgagaatccggctgtataagtctgacgggatgcataagcacctgttccgaatggtgtgacgtctgtatcctgacaggaaacaatgtgtacagcttcaagtggaacgccaagaatatctgcagtcatctgtgaatatgcagtatcagcaccctgtccgatctctgtctcaccgagctgaacctgaagagaaccatcctgattcaataccatacggcaggaagatgtctcaagtgagattggccatacagctgtgttgtaccagaagactgccataccgatacctctgcggatatctcctgtctggttctggtattctttgtatttacgaaggtaatcagtaacttcgattcctttgtcgaggcactggttgaatgtgtcgctgtataattcatttttagaaaatgcatccttatatccgactggcatcaggtttttgcggcggaattcaagcggatccatgttaagttttgcacaaatgtcttctgtatgacattctacagcccacattgcctgtggaattccgtaaccacgcatcgcaccggcaacggatttgtttgtgaatattgtataagcatcagcctctacgttatcacaaggataaagctgcgggaatgcgccaactcctttggcacagatactgtgaccgtgagatgcgtaagcaccctgatcagaaaatgcttccagttttcttgcagcaaatgttccatccgggcgaacccatgaaatgatgtggctcttgatcgcatgacgtacacgggtagaaacaaaggtctcctctcttggtacatcaagtttaataagatgtccgtgaagctgcatggacagccatgcacaaagtggctcatacaaaacatcctgcttatttccgaaaccaccgccgatgtaaggcttgatgacacgaatcttaccccattcaactccaagtgcctgaccgacaactcgacgcacgatatgaggaatctgagtggaacttacaaccttgatgcggtctccttccatctcagcgtagcagatgaagttctcaatatgacagtgctgaacagttggtgtgctgtaccagccttctactttgatcagtcccggttctttgatggcttcttcgtagttacctttactgatcgttgtatgcttgagaatattgttcggatatttttcatgaagctgaggagcatcctctttcatagcatccagaacatccagaacaaatggatattcttcatattctactttgatcgcacgaagtgcctgtgcagcggaaacctcatcctctgctacaaccgcagcgatatcatccccataaaatctgacgcggtctgtaagtacaagacgatcggcaacatcctgatgtgattcatctgtggaccatggatgtccggcagttggaaaataatgtttttcctttaaatcaaaacaggtaaatacttttacaactccaggtatcttctcggcttcagatgtgtcaatagaaagaacacgtccgttggcaattgtagagtgtaaaatacgtgcaatataggcactcttatcacagagatcatctgtatattttgtacgtccaattactttatcgtaggcatctacacgagtaaccttttttcctacatacatgttatcccctccttaaacataagtttggatcaaccgtttacgtaaaaatcaatatcctgtttcatctgaagatattgtgctttggtaattacgatctttcctttattcagcgtcagaagattcatctcttccagctttctgatgtttctgtccagagttttaatagaaatccccacttcttcggaaatgcgcgctcgtgtctggttaagtaccagaatctccggtgccgggatcttttgttcatatattcctgctttttaagtggtaagctattaaataaatccacgaatcttcctcctcctttttattcattatagagagaaaagctgatacattaaaaggccatgtgacattttttctccgcttttttgaattatggcgttttggacaaaaaatgactataaattaattatattataatgtttttttggcgaaaatgacaataaaaattgaaaaaatattgatttgtaaagttatccacaaattatcaacaaaaaagatgagttataaacaagaaacacattgcaattaaaagtggactgggatattctgagaacataccaattcatgaagttggtgttgggcaggtaagaggactgttctattttaaatatcgcatcaaaataaacgatgaaaaacaaattacaaaactatttcccaatgatcagaaccaaaggacaagtgcttgaagaaatccggaatagcccgaaaatgtggaagacattttgcggttgggaagaaaaataccaacaggaatatcttgacatttgcactggtgtaaaaggtgtaaaacttctctatgatacctattttaaagttattatgaatccggataccagacccgaaaggttaaatgattttctatcagaaatactgggaagaaaaattagaattttaaaagtacttccgaatgaatcagcgcgtattgcagcagagagctccttattgattatggacattgttgttcagtttgaagatggcagtatagcaaatgttgaagtacaaaaaatgggatatttatttcccggacagagaagtgcctgttattcttctgatttattgttacgacagtataaacgagtgcgcgcagaattaggaaattcatttacttataagagaattcagaaagtctatacaattgtattatttgaaaagagcagcgctgatttccgcaggttttcgaaagaaatatatattcaccattgcgaacaaaaaagtgatacaggagtagaagtgaatttactgcaagaatatacttttatatgtcttgacatttttagtgacatcattcaaaatgaaaacagaaagataaaaaacagattggaagagtggctcgtatttctcagtcaggatgatccggagatgattataaaacttttgaatcaaaattcggattttcagaagatttatgaagaaatctatacactctgtcttaatatggaaggaatgatggagatgttttcgaaagaacttgagattttggatcgtaatacagtaaagttgatgattgacgagatggaagaagaattggcacaagtaaaggcaagtgttgcaaaacaggtcgaagaacaagtggcagagaaggtagccgaacaggtggctcaagcgaaggagagcattgcaagagaactagaagaagagaagcaaaagatagaagaagaaaagcaaagagcggaagaagaaaaacaaagagcagaagaagaaaaacaaagagctgataaagcagaagaggaaaatatgagattaagaaagaaattgatggaattgcaaaaattgtaataaggtagatacaaaaaattaaaaaaacttagaaaaatttaaatttgtgcttgcatatctctgatacgtatgataagatataactcgtgtcagagataacacaagacacgcgggtgtagttcaatggtagaacaccagccttccaagctggatacgtgggttcgattcccatcacccgctttttttgtacccgtttttaaaaaagaaggaggccaagaacatgaaaacagcaattacaatcgccggaagtgactctagcggaggcgcaggaatccaggctgatatcaagacaatgatcaccaatggagtatatgcaatgagtgcgattactgcattgacagcgcagaatacaacaggtgttacttctatattaaatgcaacaccggaatttttaggacaggagcttgacagtatctttacagatatctatccggatgccgtaaagatcgggatggtttcagataaagaactgatcaaagttattgcagcgaagctgcgtcagtatgaagcaaagaatattgtagtagatcctgttatggtagcaacaagcggagcgaagctgatcagtgatgatgcggcggatacattgaaggaagaattattcccgcttgcaagtgtactgactccgaatattccggaggcagaggagttgatcggaagaaagatcacaagtgcagaagagatgatcgatgcggcgaaagaaatttcagaaaaatatcactgtgcagtactctgcaagggtggacataacttaaatgatgcgaatgatctgctgtatgcagatggagcgtatcgatggtttaacggaaaaagaattgataatccgaatactcatggtacaggttgtacattgtcttctgcgattgcttctaatcttgcaaaaggattctcattggaggagtctgtggagcgtgcgaaagagtatatctctggggcacttgcagcaatgcttgaccttgggaagggaagcggtccaatggatcatggatttgctatccagaatgaatatacaaaagaagcagaggcataaactatggaaaaaagaacatcattatttgagaacggattaatctggtttggagcaggagtctccattgctgagattcttacagggacatattttgcagctcttggatttggcagagggctggcagccattctggtaggacatgtgattggatgtatcatgttgtttctggctggagtgattggcggtaagacaagaaaaagtgccatggagacagtaaaagacagctttggaagtcatggaggacagcttttcgcaatcctgaatgtgcttcagcttgtcggatggactgcaattatgatctatgatggagcactggcagcaggaggcatctttacagtgggacactgggtatggtgtctggtaataggagcattgatcattgtatggattctgatcggaattacgaatcttggaaaggtaaatacagttgcgatggcagcactttttattcttacattgattctttttaagattattttctttgatggaactgtagttacatccattaccgatgagacattttcctttggagcagcagtagaacttgcggttgcaatgccattgtcctggcttccgttgatcagtgattatacaagagaggcgaaagaacctgtgaaggcaaccgcagtcagtacagttgtttatggagttgtaagctgttttatgtatctggtcggaatgggtgctgcattgttcacaggagaaagtgatatcgcacagatcatggtaaaagcaggacttggaatcgcaggtcttctgatcattgtattttcaacagttacaaccactttcctggatgcttattcagcaggaatttcaagtgaatccatctttgcaggacttaaaggaaaatacgttgctgtagttgtaacagtgatcggtaccatcggagcaattgtctatccgatggacgatatcacagatttcctgtatctgatcggctctgtatttgcgccaatgatcgcagtgcagattgcagatttctttattctgaaaaagaaaaaatcggaaacaggattcgattggtgtaatctgttgatctggctggccggcttcattttataccgtgttctgatgaatattgatatgctgcttggaaatacacttccggatatggttttgacaattcttctttgcatgatcgtggcagcagtaagaggaagaaagaaagcatagccttttaaaggtcagcgcgaagcataacctttgcggtaaagactccatcttcataagtaaaattacaagaaccatcgttcttttctgccattctgcggacagactgggtaccgattcccagaccttttcgcttggtggaatggaacagatggttcttttctttgatcgttccgtcaaaattattttctacccggattaaaagaatagaagcagaatgttgatagatttccaacgatatctgctgctgcgcagcggtagttttgcgactggcttccaatgcattttctaatagattggaaagaataagacagagatccatttcatctacggaaagttcttttggaagatcaacacgggcatcaaatggaatttcttctttttgggcaagcgcataataatatccgattacgttatcgacagagtgattttcacagaagtgataatcaagggtggggattttatccattgcattttgcaggtattctttgatcttttctaaatcaccgtctttggccatggcagaaagttgtaaaaaatgatgacgaatatcatgtcgagcctgtctggcttcttcaatcgcacttcttaaattctcatatcgttcctgctgtacagaaagaaaaagattttcctgctgaagttttttgtttttattcaggatattagccatcattaaaaacatcgagtaaaataatgcaaggatgagtagaagagcataaacaatcacaatgtatccacgcagaaaacgctgcgtgtgcaggatggtattatattttggaatcaaagcaaggttcaatccgatgaccagaaccgggagaatccagaaaacataccaggtctgagcaagattttcatcttctaccatttctttgactgaatgggaggctggataccatatgagaaggacgaaaagaatgcagaaaagattatacaggattccaaaagtagaaaaaccggaaaatgcaaggtgttcagaaccaaaattcaacattgcagaagcagctctggaaaggctgttaaagcaggaaaaaactgcacagacggcaagaaagatgctgacagatttccaaagtgaaattaataaagtgctatgatatagaacaaatagaacaaataaaagaggaagaagaacagatcttgttgacaaatggaatctatagcatgcaaaaccacaaaaacaagagcatataataagaagcggaagcatccagacagccagcttcttaggtgtttgcttcagagatgatcttaccggcagataggcaagcagcacaccaggaatcaaaactgtaaattccaaagtctggaaaattaaagtccgcatcaaaatccctccttttgaaatagataatccataaagtgttgtcgtgcaggtttgcacagttcatattaaatacaaacgttttgacataggattagtataccacagaatgacgattcgtgccattttcagacagttcatgtcaaaaatattgaacaatctggtatcaaaaatataataataagaaatatgattgccgataatatagcaaaatacaaatgaggaggaaaaacggatatgaaaacaataaaaaggataatggcagcgctcatatgtatgacgatagcacttacggggattccaatcagtgtaaaagcggcagattccagtggaacgctggacacaaatatggagacgaacagtgaattatttattacattggaagaaaatacagattatcgttggaatgtaaatgacagtggcgagaaaggaagcgatgtacatttggataccggagaaggcggtaattgccgttttcgtctggataaaatagaaaacggatggtatggaattaaacacattaaggtgaatggaacagatcgtttcgcagatgtagaagatgaaagtaaagatagcggtgcaaagatacatgtatgggaaagtaatgatgagaaagtcaaaggaaaagagcatcgtcaatttgcattttattatcttggaaatgatgcaaacggaaataaaagatattatataaagaatagaaaaagtggaagatggcttggatactcaggaaatttgaataataataatccaaatattattcagacagaagaaaaagatagaaaagtctggctggttacaaaatcggtggttccgctcacaggaaaggaaacacagattttaaaagatggagataaaagtgtagtttctgaaatctataaagcagaaacacatgaagcaataaacaggccttcaaatgagtcactcccaggaacacagttactttttctagaacaggggatcgccagtaaatggaaactggtttggtatccagactatcaggcatatagaattgaagctatatcggatggagagaaagataccaattatgcgatagatgttctgggagaatcaggttgtgcaaatacaatagtacatatctggaataaggaaagttttgacagaaatcaaaataccagccaactgtggcgcttctttagacaggatgatggaacatataaaatcatgaatgccagaagcggtatgtatctaaaagaggggattggcgagacatggattggtcatacagcgacggctatgaatgtgtcaattttggcaggaagtacaaatgatacggcttacggttacgcagatgaatggatggcagatattccagatgatgcactattatcttctgtaaatattccggcaacacatgatacaggaacagcaggggttgtacaagaccttgttgcaagtttatcactcacatcttgtcagaatctttattatgatgagcagttgaatgtgggagcacgtagttttgatattcgtggaaatgcaacaaaagacgatgcttctgcggcagacgtgaagattatacatggaggcgatacatggcagtgtcaggaaaaagacggaagtgatcttacattacagtcaatctttaatacatcacttgcttttttggaaaaacatccttcagaaacaattattcttacgataaaaccggatgatggttctacagtaggaatggagcatgcagttgcagaatttgtgaaaaatcatcaggataaagtgtacactgagggagacattccatcaatgaaggaagctcgtggaaaaattgtacttatccgaagatttaaattaactcaaaattatgaagcctggcagacgcgtgcaatgggacttgatcttaccaattgggatgatgtgagttatagagattataagtatgcatataaaacatatgatgatggaaaaaatcgagtgtatatccaggatgcatataatacatatgactgtgatatttattcaaagaagtgggaatatatagcaggaacaatgaaacagacaacaggaatagatacaagtcatccaattgattctaattcatgggtatttaattatacttcctgtgcaaatggaattccgttgaatatgacaagagatatcaattcggatttatataaagataaggagaattgtatcgataaccgattccttggaacagtaatgcttaactttattgatgaaccaatgtcacggttgatctatgagacaaacagcaacatgatatttgaaccaaaacttcctacaccggaagtagaggttgaatatggtcagacactggcagaagctacattgaaatggattgaaaatgcaccggcaggaacatggaagtttgaagatgcagctcatgttgtgacagatcaggaagtagcagatcagacaaaatttgaactgaccttcctgccggcagataataaaaaatacaaaactgttactatgtgggttccggtaaaaacagtgaataagtcagaagtgatcacagcgtatctcggatatgaagaaatttcctatggtgaaactccgaagatgtcatacgttgttgcaccaacggaaacactgagcgcagatgaagtggaagaactttttgcaaatgttacggatgaaatgagaatccaggagacaggacagtcattaaatgagacaatcgatgcaggaagctataagattgattgtccggaaacagtaggcggattcaaggtaaactggattcatttgaaagaatacgatcttgatatcaatccagtgaacacaatggaaacaacaggttccaaaagcagcacagcagaaaatactacattcgaaaatggagcagtcagtagtgcacagagaatcattgtccgtgcagaaaagaaaacaaagacatatggagatgagttgaccagcgcagatcttacatttacgatcagtgattcagaaaaggcgaaacttcttccaggagatactgttgaaagtctcggactgacattgaaagcaacaactatcgaaccggaagatgttctgacaggaagcataacagatgaagatggagatgacattcttggcgcatatggaaacgcaggaagatatgtcatcctgaaagacaatgcgacaaatacgaattatgatgttgtagttcttccggcattccttaatgtatcaccaaaggaagcagagatagaatggaatgcggcagcacagtatacatatacaggaaatgcatgtggaatagaggcaaacgtgaaagcagacagccttttagaaaaggatagttgtgcgattaaaaaactgctcaatgcagatcatacagaagttggaaattataaggcgcttgcaataggtctgaccaatgaaaactatatcttttccggcacaaaccgcgtgcatgtatgggaatatgagattttgcaggcagatccagaagtgactttcccggcagcagaagtgatttatggagacagcttaaagaaagcaacactttccggtcagtcgggagaaggtgtattccgttttgcagacgatacgacaatgcttacagtagcagaggatcaaagtgaacaggagatgatcttcacaccggctaatccgaactacaagacagttacgtcaaatatttctgtaacagtaaaaccgagaagcattacgatcagaccggaccgtacggagaaagaatatggacagacgatcacagagtatacctggtcaatcagtgatggaagtctggcaggggatgatcagttagaggatttgaaaataaatgttacattgacagcaggaaatgcagaaaaagaaaactgtacggtcggtctttatgatattacagaaaaaactccgctgacagcagataatgcgaattacacagtactgtttaaaccaggaacactgcaggtacagccaaaacctctgggcgttgcatggaatacggacggaactgtgatttatacagggaaagaagcaaatgtgtctgcagtatttacaggggtattgttcgaagatgactgcaagccggttgtagaaggtggaaatgaaatcaagaccggaacatatacagccaccattgtcggaatgatcggcgaacagagtgataattatgtgcttcacggagatgatacagactatcagatagattaccagattgtgaagaaagaagaaacaaagaatccaaccgattcaaaggaaacatcgacaggtactgcaggaaagaaaccaacaggaacttcaggaaaacaggtgaaaacagcaaagacaggagacagcatcagttacatctggattctgatgattgcaggatcaattgcagtgatcggtggaatgatttatgttattagaagaagaaaacagaagtaaaattaaagtgaatctataaacgatagatagaaaggtgtcaggcatatgtggaagctgttattttaaacttcggcctgacaccttttgttgaaaaaaagataaaattagtatattatgaaaacagatgcggtatatcttaaacatgtaataaaaagtgtttctgaccgcaatgtgttgagagaaaaggagagtgagaaatgagtgaattaagtaaaaaagcaagaaatagaacaagggtccagatggtactgacaatgttggttattgtctccatcatcagacaattctttttaggaaactatcacaatatgtttcttggaattctaacattgattttgtttatggtgccacagtttatcgacaagaaacttggagtgacaattccggttggtctggaaacggttattctgatttttatcttttcagcagagatacttggagagatcaatgcattttatgtaaagattccggtatgggatactattttgcatacaacgaatggattcctgatggcggcaatcgggtttgcgctgattgatttattcaacagaagtgatcgattttcaattaagatgtccccatactttgtggcattttttgcattttgtttttcaatgacagttggtgttttgtgggagttctttgaattcagtatggattggtttttcggattggatatgcagaaagactggatcgttccggcaattaattcagtgaagctgaatccgacaggagcaaatatcccaatccatgtagatgttcagtctgttgtgatcaacggtgagacgtggaatctgggcggatatttagacattggaatcgtagatacaatgaaagatcttatggtgaattttgtcggagccgttgtattttctgcaattggaattttatacctgaaacatcgcggaaaagggaaattggcagcttcattaattccacaggtgagagatacggatgcagaagtatctgagaaatagaaaacgtaaaggacagatcgatgaacagtcaaaaagaaattagaaatataaagataaaaaaccagttagagctctggctgttctgtgcaattatcggtgcagttgccggtggattggtctgggcacttttaaagatcatgtcagtcgggatgaatcttatctgggaatggattccagaacattttttattaccatactatacgatagtggtctgtgtgatcggtgcatttcttatcggtatcttccggaaggtgtacggagattatccggaagaaatggaaactgttatggcaaaagtgaaaacggagaagcattatgattataaaaatatgcttgtcatgatgatcgcagcagtgctgccgcttttgatcggaagcagtgtaggtccggaagccgggcttaccggaattatcgtcggaatgtgttactgggcaggagataatctgaagtttgccagacagcatgcgaaggaatactcccagatcggggtagcagcatccttaagtgttttattccatgctccgctatttggattgtttgaagtggaagagaacactttagaagagaataagtcagaacaaactgttgttccggcaggaatttcatcaaagatatttatttatggaatcgcaattgctgctgcaacaggtatttatgcaggactttccgcagtattcggttcaggactttccggttttccaagctccgaggcagttgagatcggaaagatggactatgcattaatacttctctatattattgcaggatgcgtgttagctgttttttatgaaaagacacatcagataacgaagaaaactgcgaaaaaggtaccggcagttcttcgagaagttttcgcaggaatttgtcttggaatctgtggaatgttaatcccggcagttatgttttcgggagaagaacagatgggagtgttgatgaaagagtatagtcaataccttccgttagcactgatcggagttgcatttttgaaagtgcttctcacaaatatttgtatacagttcggtttgaagggaggacatttcttcccggttatcttcgcaggtgtatgcatgggatatggcgtgggaatgctgatctgcggaaatgcagagagtcatcttgttttcgcatctgcaattgttacagcggcgcttctaggtggaacgatgaaaaagccgttagccgttacaatgcttctgtttctatgctatccggtgaaattgttcgtatggatttttgtggctgcggcagcaggcagcaaatgcctatccttatttgataagagaaaagtggaaaacaaaaattccgttgagtgaaaactcagcggaatttttttaccctttttgagatgtcttccagttcttctttggaaagttccgggagacgttctaatttatccaggaacatcattgccgtttcacgacgctgcatctctacaatctgtccgtaataattgacaacaacaccggtaacgattgcaacaacgaagatcgtgtagattgtgacaagtacagaaaccagtttgccaatgaaagttatggcaacaatatcgccgaacccggcggtagaaagtaccgcatagcaataccagagggcatctccatagtggttgatgtcaggctctaccagttgaatgatggctgcggatacaaagagaaatacgatataaccggaaagaatctgggttgctttcgtgcgttttaggatcatccataaaagttttagctttttcatatattaacggctccgtttcataaatttcagataaattaattatatcatgaaatggagtcaaaagaatagttagataaaatttattctgcggttttcattttactgcctttattcagaattccattaaagcggctcatgaatgtgattgttgtaattgtggctgcaacaatatcactgatcggttctgcaagaaagactgcaaaaaccttatcctgaataaagagtggcaggataaagatcagcggaatcagcaagatcagttttcttaagcaggcgagcagcagactgacctttgcctgtcccaatgccatgaaactttgctgacatgaaacctggaatccgagggagaaaatacctgccatatagattctcagcgcccatgcggtataagtgatcagatccgtattgttggaaaagattcctgcaaacagcttaggaaacagcagcatgatcagccagaaacagctggtgaaaatcgtacaaaccttaaattgtgtaaagaaggctttttttactcgctctttattgccggcaccgaagttataactcatgatcggctgaccgccctggcagattccctgcagtggcagcgtggcaagctggctgacacttgtaatgatcgtcatggctccgacagcaaggtctccaccatatcttgacagactggaagtaaagctgatggagagaatactttctgtagaaagcatgacaaaagtggaaataccaagtgcaaggcatggtaagataacatccttttgtaatctgaaattttcttttctaagatgaaggatcgtcttctttccggataagaaacgaagaatccaaatcgcaccgacagcctgacttaaaacagtggcaagtgcggcacctcttacaccaagattgaatacgaagataaaaatcggatcaagaatgatattgatcacagctccgatcacagtagtcatcatactgatcttggcaaatccctgtgttgtaataaatggattcattcccatcacgattaagacaaagatacttccaaggatatagattcttgcgtatgctactccgtacggcagtgtcttctcgctggctccaaaaagtgtcaacagctgtggtgcaaatgtaaagaaaactacagtaagtatgacagccataaggatgagaagtgcaaaacagtttccaaggattttttcagctgttttattatctttctttcccatagatatcgcagcacgcggagcaccaccggaacctgcaagcatagcaaaagcgttgatcagcataaggatcggtgtaaataatccaacgccggttaatgctgcggctccaacaccggaaatgtgtccgatatagattcgatctacaatgttatatagaagattgatgatctgggcgacaaccgcaggaattgcaagctgtgccagaaggcgcggaatcttttcagtctccatcgcctgagaatttgatttgctattcatatctgttttctcctaaatagatttaaagtcaaagaagattatacatctcatgtaatggaaaaatcaatattttaccatatatgcattacatgctgcattgcaaggctgactactgtaattccaacccagcaggaagcaccgagaaggattggctttccaccagatttgacaagcttcacaacattgctgttcagaccgatcgcagccatagccatgataatgaagaacttagacagttctttcagcggagcaaatacatccgcacttaccccaaggctcatgcatacagttgtaatgacggccgcaatgataaagtacaggatgaacattggaaaagctctttttaagctgaacttaccggatgattttccgtcttttgcggctgatttcgcacgaattagtgagagcacaagtgtgatcggaatgattgcaagcgtacgtgtcagtttaactgtgacagcagtattaagtgtctcacttccaagattccacatgctgtcccaggtagaggcggcagcagttacggatgaagtatcattgatcgcagttccggcaaagacaccgaaagcatttccgcttgttgtgtcgaagccgagtgcatttccaagcaccgggaaaagtacagcagcgataatattgaagaaaaagataacagaaatcgcctgtgcgacttctgtgtcatcggcgtcaatgacaggcgctgtagcagcaatcgcagaaccaccgcagatggaagaaccgacaccaacaaggatagatgtgttggaaggaacattcagcaccttgcggagcagccatgcaatgatcaaagaggtagaaattgtactgacgataataggaagagactgctttcctgtctgtaagataactccgagattcataccgaatccaagcagaacaacagcagtctgtaaaataattttagatgtccatttaattcctgattcggctgttcctttttcagtccaaaagcaggtgatcatcattccggcgagaatcgcaatgacaggtccgccgattaccgggaatgattttccaatcagccaggatggaatcgcaatcagaaagcagaccagaattcctttgaaatttttttgaataaaattcatgatagtttcctctcttaagtcttttgttactgtcgcactatgggcgtcagcaaccgtatttttatgaaacaattatagattataacactggcaaacagaaaaaataaagactttacaaaatttttagaaaagaattagcactcaactatttacagtgctaacaatccgtgctatattcctaatagaacacaggaaaagaaaatttgtggttcaaaggagggaaagaccatgaatatcaataaatttacacagaattcattacaggcagttcagaactgtgagaagattgctgcggataacgggaatcaggaactggcgcaggaacatttgctgtatgcgctgctgacacaggatgacagtctgattttaaaattatttgagaagatgaacattcagggccagctctttattaacagtatcgagcaggcaatcggcaagagaccgaaggtacagggaggtcaggcttatgtcggtcaggacttgaataatgtgctgatccatgcagaggatgaagcaaagcagatgggagatgagtatgtctctgttgagcatctgtttcttgcaatgctgaagtatgcaagccgtgagttgaagcagattttccgtgaatatggcatcagcagagagggcttcctccatgcgctgtcaacagtaaggggaaatcagagagtaacttctgacaatccggaagcaacttatgatacattgaataaatacggtcaggatcttgttgaaaaagcaagagaccagaaactggatccggtcatcggacgtgatgaagagatccgtaatgtgattcgtatcctgtcccgtaagacaaagaataacccggtgctgatcggtgaacctggtgtaggtaaaactgcggttgtagaaggacttgcacagcgaatcgtcagcggagatgtaccggaaggcttgaaagataagacaatcttttcgctggatatgggagcactggtagcaggagcaaagtatcgtggtgaattcgaggaacgtctgaaagccgttctggaagaagtgaagaacagtgacggaaagatcattctttttatcgatgaacttcatacgatcgtcggagccggtaagacagacggtgcgatggatgcaggaaatatgcttaagcctatgcttgccagaggtgaactgcattgtatcggtgcaacaacactggatgagtatcgtcagtatattgagaaggatgcagctttggagcgtcgtttccagccagttctggtagatgagccaaccgttgaggatgcaatctctatcctgagaggactgaaagagagatacgaagtcttccatggagttaagatcacagatagtgcgcttgttgcggcagttacactttcgaacagatatatttctgatcgtttcctgccggataaagcaatcgaccttgttgacgaggcgtgtgcattgatcaaaacagaacttgattctatgccgacagagcttgatgagcttcgccgtcgtgtgatgcagatggagattgaagagtctgcacttaagaaagaggaagaccgcttaagtaaagagcgtctggaacatttgcaggaagaactggcagaactgaaagcgcagtatgcaagtaagaaagtacagtgggagaatgagaagaattccgtagagcatgtgcagaagatccgcgagcagattgagcaggtgaacaaggagattcagaaagcccaaagagagtatgatttgaataaggcagcagagcttcagtatggtcgccttccacagctgcagaaacagctggaagaggaagaagcgaaggtaaaagcaaaagatctttcacttgtgcatgaatctgttacagacgatgagatcgcaaagatcgtttccagatggacaggtattccggttgcaaaactgaacgagagtgagagaaataagacacttcaccttgcagatgaattgcataagcgtgtcatcggtcaggatgaaggtgtagagcttgtaactgaagcaatcatccgttccaaagcaggtatcaaagatccaacaaaaccgatcggttccttcctgttccttggacctacaggtgtaggtaagacagaacttgcaaaggcacttgcccagagcctgtttgatgatgagaacaacatggttcgtatcgatatgagtgagtacatggagaaatattccgtgtccagactgatcggagctcctccgggatatgttggatacgatgaaggtggacagctgacagaagctgtcagaagaaaaccttattctgttgtacttttcgatgagatcgagaaagcacatccggatgtcttcaacgtattgctgcaggtactggatgatggacgaatcacagattcccaaggacgtacagtcgacttcaagaatacaatcttgatcatgacttccaacattggtgcaaactatctgctggaaggaattaaggacgatggttcgatcgatgaacagagtcaggagatggtaatgggtgatctgaaagcacatttcagaccggaattcttgaaccgtctggatgagattatcatgttcaaaccattgacaaagacaaatgtacgttccatcattgaccttctggttgctgatgtgaaccgccgtctggaagaacgtgaactgagtgtcgagctgacagatgcagcgaaagactttgttgtggaaggtggatatgagccgatgtacggtgcaagaccactgaaacgttacttgcagaagaatgtagagacattagctgcaaaactgatccttgcaggagatgtgggacgtggagacacgatcttgatcgatgtgaaggacggtaaactgacagcaggtgtgaagaaataaaatatgataccagggtcaaaaggtctgaaaccaccggtgcttgcacaaaggtggtgtaatggccttgggacccgccccaatatgagcataaaagtggagcgtaagcttcacgatatgcgaatagtgggtaggattgtgggagtgcattgcacaaaacaatccgtaggtatcctagttgggggcttttgcccccaacatcaaaatatcagtatagtaacgatataatatacagggctgtgaaaaataaaaattttctggagatttttagaaaattgagtttttcacagctcttttttcgttcaccgaagtaattgatacaagagcagactctatgttaaaataagaaactgacagaatgcatatgcatacaacaagaattaatactaagaaagaactcaggcagaatctagaaaggaggctaccatggcgcgcattattttccacatcgacgtcaattcagcatttttaagctggacggcggttgaacaattgaaaaatggatcaaaagtggatctgcgggagattccggcgattattggcggagatcagagctcgcgtcatggaatcgttcttgcaaaatcatcacttgctaaatcctatgggattcagacgggtgaacctgtagtaaatgcatttcgaaaatgtccgaatcttgtgacagcaccgccgaatcataagatgtatcgagaaaagagccggatgctgatggatttcctgcggacatatacaaagaagatcgagcaggtcagtgtcgatgaatgttatatggattttacagagcttgtcgggcgatatccaacaccggtggacggggcgatggagattaaggaagaggtaaagagacgttttggattcacggtgaatattggaatctccagtaataaactgttagcgaagatggcttcggattttcagaaaccggatcggatccatacgttatttccggaagaggttccgcagaaaatgtggccacttccgattggagaactctttatggcagggcgttcaagtgtggaggttttcaagaaacttgaaatcaatacaattggagatcttgctcatgcggatgtaaatgtaattacgttgcatttaaaaagtcatggacggatgctttggaattttgcaaatggaatcggggacgataaggtacagtatgaaccggaagaggcaaagggagtaggaaattcaacgactctgtcagaggatgcaacgacttatgaagaagcgagagatgtatttcgtgagcttgcgcagagcgtgggaaacaggctgaagaaggcaggaaagaaagccgggatggtgagcatggaggttcgctattatgatttcagaaatatgtcgcatcaggtgcagcttcaaaagccgacgaatgatccggttatcttatgtgagacagcctgtaatttgttccgtgaaagctggagtggagaacctgtccgtctgctcggaatccgaacgtcaaagttagtagaagagaatgcaccggagcagctgacaatttttgatattgaatttccaaaagaaccggacgagaaacataagaaattaaatgccgcattggaacagctgaacaatcgttatggaaagggtgcggttgtgaaaggcacattttataaaccggacggaaagaagaaaaaagatggaatttagaagagatagaaagaggaacgtgcattgaaagagaaaaattataatctggaattgattcgaatgatttcttttatatttgttattgtgatccatgtatcaaactattactgcagagcctatggcgatattacgattggggagtacaatttttcactgctattaaatctactggcaaggataagtgtaccatgttttttcatgattacaggagcacttctgcttggaagacaggaatcacttcataaacatgcaaaaagaatctttcgttttctaattgttctgcttgtgtggagtgtaatatatatgatctggaatgcagtttatatgaaggatccttatcaaatcaaagatttattatataagccggtagaacagcatctgtggtatctgtatgcaatgattccgatctatctggtacttccttttttccaggttatgtgtaaagggatgaaccttcggatggaacgcgcatttcttgtggtgattacggcggctgttttgttcaattatatttccacattttttgatgaaaagatgtattattccgtcccaatggtgggggacagaatctattcttattatgtatttatcggatattatatatataaataccgtaagcatgtgatgaaggagaaaatgattccggcaggtatttttgtagtatgcatggcattaaattatgggctgacttatgcggcaaccttgcaggatggagaacattatgaacgtctgctggaatatggtaatccactgcttgcactggcagcagcgatggcatttcttatgttagtacgattgaaaaagagcgaattcaatccgtccgaacaggcaaagaagtggattgacagattttgtggatgttcctttgggatttatttgatccatatcatgtttcttgatgtttataagagaaatattaagccagagacattttcggcctggatcatgattccggtagtgagtgtgggacttgtgttattgtcatttggatgtgtctggctgattcgaaagacgaaaacaggacgaaagattatgtaggtttttttgcatatgtggtgagattatgttattctataaaggttaagacaatcgttatttgcctgaaagtcaatgatgcaatacaccagttcagaacaggagggttagatcatgaaattagataaattattagaacgcctggattacacagtagtacagggaagtgattctacggaagtaacaacactgatcaatgattcaagaaaagtggaagaaggatctgttttcgtgtgtatcagcggagcagtatctgatggacataaatatgcagcggacgttgcggcgaaaggtgcggcagctgttgttgtagagaaagatgtcgaagtgccggaaaatgtgactgtaattaaggtagaggatactcgttatgcactggctctgatgtcagcggcttactttggatatccggcagataagatgaaagtcatcggtattacaggaacaaaaggaaagacaacaacaacttacatgatcaagtctattctcgaagagacaggacacaaggttggattgatcggtacaatcgaggcaattatcggagacaagaagatcccgtcatgtaatacaacaccggagtcttatacaatccataaatattttgcagagatggtagaagctggctgtgactgtgttgttatggaagtttcatcacagggactgatgcttcacagaacagcgggaattccatttgagatcggtattttcacaaatcttggaagagatcatatcggtccgaatgagcataaggattttgatgattacaagagatgcaaagggcttttgttcaaacagtgtaagctcggaatcgccaatgtggatgacaagtatttcaaagatgtatttaaagggtctacatgtaagattgagacatttggattttcaccggaggcagatcttcgcgcagagaatgtagaactggtatccagaccaggatatcttggtgttgcataccatgttgcaggcgtgatggactttgatgtggaaatcgatgttccaggcaagttcagtgtttacaattcactgactgcaatctcagtctgccgccatttccaggtgccggttgagatgatcaaagatgcacttaagaaggcaaaggtaaaaggacgtatcgagatgatcaaggtgtctgatgattttacactgatgatcgattatgcgcacaatgcgatgagtcttgaaagtcttctgacaacattgaaggaatataatccgaagcgtcttgtatgtctgtttggatgcggcggaaaccgttctaaagacagaagattcgagatgggtgaggtatccggaagactggcagacctgacaatcattacatcagataatccgagatttgaagaaccacaggatattattaacgatatcaaaaccggaatcgcaaagacagatggaaaatatgtggaaatctgtgatcgtaaagaggcaatcaaatatgcaatcgaacacggcgaaccgggtgatgttattgtactggcaggaaaaggacatgaggactatcaggaaatctgcggtgtgaagcatccgatggatgagcgcgtgctgatcaaagaagttctggaagaattaaaagagaaataagattgtgtttgcagatgttattgtagatatacaacatgaaaaactggataagatctttcagtaccgaataccggaacgactgaaagacgagctgcatccggggatggaagtaattatcccttttggaaaaggaaaccgacagatcaaaggttatgtgacttcattatcagagacttgcaattatgatctgtcaaaggtgaaggagattacagacatttccagaaaaagtgtggcaatcgaagcgagactgatcgcgctggcggcatggatgaaagagcagtatggcggaacgatgatccaggcgcttaagacagtgctgccaatcaagcagaaggagaatgcgaaggtaaagaaacatctccgtttgctgcttactgaggaagagagtcaggagaagctggctttttatcagaaaaagaatcagaaagcaagagcaaggcttttggaagctttgaaggaagccccaattctggattatgagctggtgacgaaaaaattaaatgtgacactgcctgtgatccgggcattggaagagcagggcgtgttgaagatagagtcagagcaggtataccgtaatccggtgaaacaggcaaagaaatcacaacaggagatcatctatacggaagaacagcagcatgtaatccaggggttccagcaagactatctgtgtggaacaaggagaacttatctgcttcacggagtgaccggaagtggaaagacagaagtctatatggagatgatccgcacggttgttgaccagggaaaacaggcaatcgttctgattccggagatcgcactgacctatcagacagtgatgcggttttaccgctgtttcggcgacagagtttctatcatgaactcaagactgtctgccggagaacgttacgatcagatgatgcgtgcgaagaagggcgaggtcgatgtgatgattgggccacgctctgcgctttttactccatttccggatttggggctgatcgttattgacgaagagcatgaaccaacctacaagagtgagcaggtgccacgttatcatgcaagagaagtagcagtccacagggcagaagtagaagatgccagcgttgtgcttggaagtgcaactccgtcgatggaggcaatgtatcggtcaaggcttggtgagtatcagctttacgagatgaagaatcgctctcatatgcaacagatggcgactgtgcatacagttgatatgcgaaaggaactgaagaatggaaaccgttccatcttgagtgagaagttgcaggaactgattgaagacagactgaatgcaaaagagcagatcatgctgtttttgaatcgcagaggatattctggttttatttcctgcagagaatgtggccatgtagtgaaatgcccgcactgtaatgtatccttgtcggtacacaaaggtggaaaaatggtctgtcattactgtggttatgaacagccgaaggtgacggagtgtccggaatgcggttcccgttatatcggagaattccgcgcaggaacccagcagatcgaggacatggtgaaagcaagattcccacaggcaagagttctccgtatggatatggatacaacgaagaaaaaggattcccatgagcagattttatctgcctttgcgaatgaagaggcggatattcttgtgggaacacagatgatcgtaaagggacatgattttccaaaggtcacattagtcggtgcattggcagcagatatgtcactttatacagatgattatcgttccggtgagcgaacatttcagcttttgacacaggcagcaggccgtgccggaagaggtgacagaccgggtgaggtcgtgattcagacttacgatccggagcactatgcgatcgaggcttcagcagcgcaggattatgaagcattctatgagaaagaaatccgttaccgcagtctgatgggatatccgccggtggagaacctgatggcagtacttgcagcatgtgaagatgaggtacttttagagaaagcgtgcaagtatctgaaggaatacattttgcggattaaaggtcaggcacagctcgacgtgatcggcccggcaagtccgggagtggataaaatcaaagatatttaccggagagtgatttacgtaaaagcgccggaataccgaaccttagttgtattaaaagacaggatggaacaatatatagaaattaactcagggtttcagaaaatgagaatccaattcgattttaacccgatgaatttatagaaaagagaggaaagaataatggcaatcagagaagtaagagagatgggcgatgatgttcttgaaaaacagtgtaaaccagtgacgaagatgacacttcgtacaaagattttaattgaagatatgcttgatacgatgtatgagaagatgggggtgggtcttgcagcaccgcaggttggtattctcaaacagattgtagttattgatgtcggagagggtccaatcgttttgatcaatcctgagattgttgagacatccggtgagcagacaggcgaagaaggttgcttaagtgtgccgggaaaatggggaatcgtaactcgtccgaattatgtaaaagtacgtgcacttaatgaaaatatggaagagtttgagatagaaggagaagaacttcttgcaagagcgttctgtcatgagatcgatcacctgggaggacacctttatgtagagaaagtagaaggagaactgcatgattcaccggcctacaacgaggaagatatggaatacgaagtggaggaataattgatgagaataattttcatgggaacaccggacttctccgtgggaacactggaggcactggtggaagcaggacatgaggtatgtctcgtagtgagccagccagataaaccaaagggacgtggtaaagagatgcagccaactccggtgaaagaagctgcgctgaaacatgggattccggtttatcagccaaagaagatccgtgatccggaatgtgtagaagaactgagaaaatacaatgcagatgtgatggttgtcattgcatttggtcagatcattccgaaagaaattctggggatgacaccatacggatgtattaatgtacacgcatctctacttccgaaataccgtggtgccgcgccaatccagtggtctatcatcaatggcgaggaagtgacaggtgttacaacaatgcagatgaacgaaggactggatacaggcgacatgatccagaaggttgaagtgccgatcacagaagatgagacaggagaaagcctgcatgacaaactggcagaggcaggagcaaagctttgtgtagagactctgaaagctattgaagatcatacggcaactttcgagaagcagggagaaagcccgacagaatatgccagaatgctcgataagaagcttggaaatattgactggaatacatccgcagtacagatcgaacgtctggtgcgtggcctgaattcctggccaagtgcttacacacattgggacaaaaaggtagtgaagatctggagagcaaaagcagaggctgatggcacggtaaaagcagagcctggaacagtgttgagtgtagagaaagattcctttactgttcagacaggggatggcgtcttacgagttctggaacttcagattccggggaaaaagagaatggatacaggagctttcttaaggggatacacaattgaaagcggagttaaatttacacaggaataagaggacttctggagggggactgcagatagataacaggagggagttttagtatgtattatggattttattatgactggacttatatactggtactgatcggtgtggttctcagcctgctcgcatcgtcccaggtgaaaggaacatttgcaaaatattcgaagatccgcagttattcaggaatgacaggacgagaagcggcagaacagattctcagaagaaatggaatctatgatgtgcaggtgactcatatcgcgggaaatctgaccgatcattatgatccgagaaacaagacactggcactttctgatccggtttataattcaacttctgtagcagcaatcggagttgcggcacatgagtgtggtcatgcagtacagcattttgaagggtatgcacctttatcaatccgtggggcacttgtgccggtcgtaaatttcggttccatgatttcctggccgttgatcattatcggcctgtttatgaatggccagatgtccagcttccttattgatatcggaattctgctctttatggtagctgtggcatttcatcttataacacttccggtggaaatcaatgcttccagaagagcggtgaaggtacttggaaattcaggaatgctccgtgaagacgaagttggtggagtgaagaaggtacttcgggcagcagcaatgacatatgtggcaagtgcggccgcaatgattttacagcttttacgtttgttgatcctgacaaatggacgaagaaggaatgactgacaaaaagaaaaaatgctgtaactgttcagagccaacctccaaaatgcggagaataggagattatttatgggaaaacagatcaatgaacgcgaggtcgttcttgagattttgatggaaataacagagaatggagcatatagtcataagattcttggcgatgttctgtcaaaatatcaatatcttgagaaacgtgagcgtgcatttattaccagagttgtggaaggtactctggaacatatgatagaaattgattatattttgaatcagatttctaagacaaaggttaagaagatgaaaccggtcatccgtaatcttcttcgtagcagtgtctatcagctgaaatatatggatagcgtaccggatcatgcggtgtgcagtgaggcagtaaagcttgcggttcgaaaaggattttcaggtctgcggggatatgtgaatggagttctgagaaatgttgtccgcaagatggatgagatcgagtatccaaaagaagatgtacagagattgtctgtgaaatattctgtcccggaatggattctttctttatggaagaaagaatatggggaagagattacagagaagatggcagcagattttcagaaagagaagccgattacgatccgatgttgtatgaaccgggttacaccggaagtattgaaagaaaaactggaagcagaaggagcgaaagtagaagcacatccgtatcttccttatgcgttttatctttcagattatgattatctggaaggtctggaaagttttcaggaaggactctttgcagtacaggatatcagttctatgtttgtcggagaactggcagatccaaaagccggcgatcatgtaattgatgtctgtgcagcaccgggaggaaaatcacttcatgtggcagagaagcttcagctggcagatgaagtggcggcgagagagaatggaacagaagaaaagacaggacgggttgaagcaagagatctgactgaatataagacagatctgatttggcagaatatcgaccgttccggacttggaaatatttgtgctgtatgcaaggacgcttctgtatttgatgagtatgataaggaaacagcggatcttgtgattgcagaccttccatgttcaggtcttggcgttcttggcaaaaaaccagatctgaaatatcgcgtacaaccggaagatcttgaagaacttgcagatttgcagagaaagattctgacttgcgcacaggcaatcgtcaaggatggcggcacattgctgtacagcacatgtaccgtaaatccgggagaaaacatggacaatgtacactggttcttgaaagaatacccacaatttgaactggatgatattacagaaaatctttgcaaggagttacgaagtgatgtgatcgagaagggatgtatccaattcttcccgggagttcacgattgtgacggattctttattgcaagattaaagaaaaagcatgattttcaggaaatgtgaaaaaatagaaaaagcaaacaaataatgtgaataactcacagaaaaaacgaaatacaggaggaaaactttaagatgaagaaggatatccgtgcttatggatatgaagaattacagaaagagatggcgacgatcggagaaaaagcatttcgtgcaaaacagatttatgaatggctgcatgtgaagctggtagatcattttgatgagatgacgaatctttcaaaggctttgagggaaaaactggaagagaattatgagattctcccggttgttatgcttgagagacagatttcccagattgacggtacgaacaagttcctgttccgtctctatgatggaaatgtagtcgaaagtgttcttatgaaatataagcatggaaattctgtctgtatttcctcccaggtcggttgcaggatgggatgtgcattctgtgcatcaacgatcggaggtctggtgagaaatctttctccgtctgagatgcttggacagatctatcagattcagaagataagtggtgagagggtttcgaatgtggtgatcatgggaaccggagaaccgatggataattacgataatttcctgaggtttattcatttacttacagatgagcatggactgaatatcagtcagagaaatgtcaccgtatcaacctgtggaatagttccaaagatgaaagaactggcgaaagagcatttacagattacacttgcactttcgcttcacggttccaatcaggaaaaacgaagaaaattgatgccggttgcaaataaatatgatatcacagaagtactcgcagcctgtgacgaatatttcaaagaaaccggccggagagtgagctttgagtacagtcttgtacatggtgtgaatgatacggatgaagatgcacaggaactgattcatttattaaagcataagaactgtcatatcaatctgataccggtcaacccggtaaaagagcgtgattttgttcgtccaagccggaaaagtgctttgaatttcaaaaataaacttgaaaaaagcggaataaatgttactataagaagggaaatgggctctgatattgacggagcctgcggtcagctcaggcgccgttacgtagaaactgaaggagaatagaaggtatgaagacattttcaattacagatgttggaatggtgcgacaggtaaatcaggactacgtctttacgacgggaaaaccactgggtattctccagaacctgttcgtggtagcggatggtatgggtggccatcaggcaggagattatgcttccaagtgtactgtggaagtgatgatcaaagagattgcgaagagcgagggcgaggatatcgaacgagttcttgtgaaagcaatcaaggctgccaatcgtgagattatcaaagaagcatccggtgacgaacatctgaaggggatgggaacaacggttgttgccgctactgtgaaagaacagatgctgtattttgccaatgtaggagacagccgtctgtatctgatcaatcaggggatccaacagctaagtaaggatcattctcttgtagaagagatggtacggcttggaggaattaagccggaagaagcgaagcatcatccggataagaatattatcacaagagcgatcggtgcaaaagctgatgtggatgtggacttttatgaacaccgtctgaaacggggagacatcattctgatgtgtacagacggattaagtaatatggtggaagatgaagaacttttccatattgtgcagggaagccgggatatcgtcgaggcaggtgagatgctggtggaagcagcaaaagagaatggaggaacagataacatcggagtggtattgtttgagccatttgcagatgaggtgagtgtatgattaaagaaggagtatttttaggaaaacgatacgagatacttggtcgtattggttctggcggaatggcagatgtctataaaggcaaggatcataagctgaatcgttttgttgcgatcaaggtgttgaagagcacatatcgttcggatgagacgtttattaagaagtttttaagtgaagcgcaggcagcagcaggattgatgcatccaaacgtagtcaatgtctatgatgtagggcaggatcgcggtctttattatatggtcatggagcttgtagaaggaattacgctgaaggattacattgagaagaaaggaaagctttcagcaaaagagacaatcagtatttccatccagatggtgacaggtattcaggcagcgcataactgccatatcattcaccgggatattaagccgcagaacatcattatttccaaagatggaaaggttaaggttactgatttcggaatcgcgcgggctacgacatcaacggcaacacaggcagtaacaacgacagtgatgggatctgtacattacacatctccggaacaggccagaggcggtattgtagatgagaagagtgatatctattcagcaggtatcacgatgtatgagatgatcaccgggcatgttccgtttgacggagattcgacagtgacggttgctttgaaacacttgaatgaagtgatcaagtctcctgcagaagaagttccggatattccatacagcctggagtgcattattatgaaatgtacgcagaaactgccgaataagcgttatatgagctgcgaggagctgcttcaggatctgaagcattcactggtagatccggaaggggattttgttgttcttgatggtgtgacaaaacgtatgccggcaacatcccaggatacaggtcggactacggttgttatgtcaccggatgaactgaatcgtatgaagaatcgtcagaattataatgatgattatgacgacgattatgatgatgattatgaggacgactacgatgaccgccgtagaagccgttatgatgatgacgatgactacgacgaccgccgcagaagccgttatgatgatgacgatgactacgatgatcgccgcagaagccgctatgatgatgacgatgactacgacgaccgtcgcaaagaccgttatgatgaccggaatcgccgtaagaagaatgaagtaaataaagacacgaagaagatcatgaagattcttatggttgttgccggtgttgtgatcgcacttttgatcatgttccttgtaggaaatgcagtgggcgtatttaaaggtggaaaaggaacgactacacagcaaacagattcagagatggtaaaagtaccggatgtgacaggcaagacatatgaggaagcacagaaagaactgaacaaatatgatctcggaatccataagtcaactgcgccttccgatactgttgcaaaaggaaagattatcagccaggatcctgctgatggaaagaaagtaaagaagcatacaacagtcaatgttgtgatcagcagtggtgaagaagctaagatgacaacgattccaagtgttgttggtttggcagaagctgatgcagaaaaagcacttcaggcgaagaaccttgttgtgaagaaaggtgatcctgtttacagtgatgatgtggagcagggagaagttgtttctgttagtccgagtgaaggtgcagaagtaaaagaaggaacaacggttactcttgtaataagcaagggaaatcagccgacaaaagttcctaaacttaccggaaagtccaagtcggatgctgaagcagcactttcacaggcaggtttgtccggaaatgcaactgaagattacagtgatactgtagaagaaggagttattatttcacaggacacagatgccggaaaagaagtatctaaaggtacaacaatcggatatgtggtgagcaaaggaccaaagatgacggtggttacagtaccggatctgtcctataaagaccagaatacagcggaaaaactgttgaagcaggcaggacttacaccggagtatattggtgaagattatagtgatgaatatccagaaggacaggtattctatcagtctgttagcagtggtacgcaggtagaaaaaggaacaactgtccagtatatggtcagcaaaggatctcagccatcagatccggatagtggagattccggaaatgattccgggacagaagagaacacgaatcaatgataacagagagcaagtatatgcagggaaagataataaaagggattgccggattctactacgtgaatgtagtagaatccggaatttttgagtgtaaagcaaaaggtgcttttcgaaaagacggaatcaagccgttggtcggtgatgatgctgtgatcgaggtacttgatgaaaaagaaatgacaggaaatatcacaaagatcttgccgcgtaagaatgagttgattcgtccggcagtagccaatattgatcaggcactggttgtatttgcggtgacaaaaccgaaaccacattataatctgttggatcgttttcttgtcatgatggaacgaaaagagatacctgtcgtattatgttttaataagacagatattgcaagccatcctgaaattgcagaattgaaagaagtttataccggatgcggatatccggtaatcttcacaagtgcgaaggaagaagaaaatatcagtgagttaaaatcacttttaaaaggaaagacaacttcgattgcaggtccttctggcgttggaaaatcatccctgatcaatcttctgcagtctgaagtgaagatggagacaggaagtatcagtaagaagattgaccgtggaaaacatacaacaagacattccgaactgatcgtgattggagaagattcttatattatggatactccgggattcagttctctttacgttaatgatttcgaaaaagaagatttaaaatattattttccggaattcacaccgtttgaaggacagtgcaagttcaatggctgtgaccatattcatgaacccggatgcgctgtaaaagaggcagttgaagaagggaagatccataagatcagatatgaagattatacggagatgtaccgtgaactaaaggaaagaaagaggtattaagtttatgaaaaatattttggcaccatctattctctcagcagatttcaagattttaggagagcagttgaaattaacagaagaagcaggcgcagagtatattcattttgatgtgatggacggaatgttcgttccaagcatttcctttggaatgcctgttctcgcatcgatcaagggagcaacaacacagacactggatgttcatctcatggtgacagaaccgatccgttatgtggaagaattcgtgaaagcaggagcagatatcgttacagttcattatgaagcatgtgaagatctgcaggcaacaattgataaaatccatgcagcaggagcgaaagtgggaatttctattaaaccaaagacaccggttgatgtactgcttccatatctggatcaggcagagatgtttctgatcatgtctgtagaaccgggattcggcggacaggcatttattccggaatcactggagcgtatcagtgaattgagaaaccttctgaatgagaaaggacttacaactgatattgaagtagatggtggaatctatcataaaaacgtggcagaagtacttgcagccggagcgaatgtaatggtctcaggttcaggcgtttttaaaggtgatatcaaagataatacagcaaagtttatggagattttaaacggcaatgtgtaagagaacagttattgtgagcgggggaatgctggaagaagattttgtccttccaattcttgaggcagaagagacagaatttattatcggagtagataaaggactcgcatttctttatgaacataagatcaagccggattacattgtgggagattttgacagtgtgccggaagaagtgatcgattattatagaaaagaagcaagtgtaccgatccgggagttcaatccggtaaaggatgcgtctgatacggagattgcacttcgtatgtgtcttggactcagaagaaaagaaatctggattcttggaggaacaggaaatcgtctggatcatttctgggctaatgttcagtgcctgaatattgcacttgaagcaggatctcaagcgatgatcttagacagtcataatagaattcgtctgcttgatcatggaatcgcaattcgcagagaagaagctttcggaaagtatttttcagtatttccgatgcaatttccggttgaggatttctgtatcagcggtgcaaaatatccattgcagaatcatttgctctcatcaggagacagcttgtgtgtgagtaatgagttcgcagaaggtgaagatgaagtgaagatctctttcgtgtttggaaaagtgattctgatggagacgagagattgaaataagggatttgtaggagcattcatgtaagtttttgaagaattgcccactttgcggatcactaatcttggatgtttttatcgaagctttaatgcagtaacaacgcaacaattacataaaaagagttgctatttttatgaatttgtcatatactattcttagatagagagcctatcttcgggagagttcctgccatataagtggaagattttaaactcgggagagctcctgccatataagtggagaattttaaactcaaagggagcgttagctcccttgttttcgtataaggagaaataaataaaaggagatacggatggaagaattcaaattatatagtgtttcggatgattatgtggaatggttgcgtaaggattttccaaacgtatattctaacaaaattaattctagaacacatactaggaaatatttgggtgtagttttgcagattggacaatatcattattatgttccgatgtcatcgcccaaagattcggattatcagattgcaggagcaaataaggtcattaagaaaagcattgtgccaattatacgaattgtagtaaaaaataaagagggtgaaaaagaattaaagggcacactcagaattagccatatgattccggtacctacatcagaacttgaattatatgatttggaaaatgaatcagatagtacgtataaggatctcgttcacaatgaaatgatttttatacgtaaacatcgtgagaaaattatttcaaatgccaaagtgatgtacaatcaaaaagtatcaaatgatacaacggctgggtatgtgaaatcagcactagattttcaagcactagaggtgctatgtgataagtatgaaacaatagattcaagcctgtacccagtagtataaaatagtagatgaaaatttagtagaaaacatattgattttgtgaatgaaattggggaatatatgcacataaaataaaaactttcgaggtttttatcggaaatggtgcttgcaccaagtctgggtttgaaaaagtccgttacaatatacagaggtgttatatatattgtaatggactttttgtattacattctagaaaaatcaggaggtgtgtatggtaataggaattatagaagatgataaattgttaagaaaagcattagatacatctttgaaaaatcaaggttatacaacgattcttgccgcttcaagaaaagaggcaattaaaaatatagatagttctgtagatttgttgatcgtagatattggattgccggatggggatggaataaatctatatcaggagcttcaaaaaaatggaaaaattccagctatttttttaactgcaaaagatgatgaaaaagatatgttaaaagcgtttgatacaggagcagatgattatgtggttaaaccattttcaataaaggtattgctaaaacgtatagaagttgttttaaagagaaagtcaaatgaaaatacttttatgtgcggacaagtcattttatattctgatagaaaacaggtttttgttggagagacggaaatatttttgacagccaaagagtatcagcttttagaatatcttattatgaatcagaatcaggttcttacaaaagagatgataatggaaaatatatggggaatcgatagtgaattcattgatcctaacacaattagcgttatgatcagcagattgaaaaagaaattgaatgattcatcgaatgttattagtaatgtatttggaatgggatatagaatgggagaatagcatggctgtagtaaattttgcagtgtttttgattggtttcatactcggaggaagtactgtatatttagtggaaaatcatttaagagcgaaggaaataaataaaatatataaattgacggaatccttaataaacggcaatgaattagatggttcagatatcgggaaggaaacgctttattccaaaactaccaatcaattaatccgtttacaggaaatgttagagggaagaagaaaagaggccgaaaaaagtcgatatgagatacagaaattgatttctgagattgcgcatcaactacggacaccgctgtcaaatataaaaaattatacagaattgctgcaagaatcattgaatgaaacgcaagaagtattgaatgcagaatacatgaaagacttgcgaataagtgaagaacaattatgctttttggtggagagctttataaaaactgcccgattagagcagggaatcatacaagttcacactcaaaaagaaaatcttgttgaaacgattctaaatgcgttggggcaaatacagaaaaaggcagaagagaaagaaatcttttttcaagtagaattgccagagaaaatcatttgcgaacatgataaaaactggatgtgtgaggccctttataatgtgtttgataatgcagtcaaatatagtaaaaacaacagcacgatcaatatcacaatgaaacagacagaaatgttttataaaattcaagtaagagattatggaatcgggataaaagacggagaagaaaataaaatttttcaaagattttatcgtggtgagcaggcaagagggcaggaaggatgcggaattggtttatatctttccagagagattgttctattacaaaaagggatgatgaaagcaaaacaaatgaagccagggctgcttatagaggtaaatcttccggtagagacagttcatatgcagcttgtaagaagtttgtaagaggtaccatgtataatagattatggctgagttaaaggtagcatttacgaaaggagtttacagaaaagatggatataatcaaagccatgaatctaaaaaaatattatacatccgatacatatgaagtgcgtgctttagatggtgtgtcgttgactgtggaagatggtgaatttatagcagttgtcggtacgtcaggatgcggaaagacaacacttatgaacatcttaggaggtcttgatactccggattttggaggtgtctggatcagaaatacaagtttaaaagatcttaacaaggaagaaagaacgatattcagaagaagaaatatcggatttgtatttcagcaatataatttgataccttctcttagtatacgtgaaaatattgtcctcccaatgagactggatggcaaggaaatcgatgtagattttttcaatgagattgtagaaatactaggactaaaagataaattagaacgtcttccatcaacgctgtccggcgggcagcaacagcgagtttctatagcgcgggcattattgacgaaaccggctattgtcctggcggatgaaccgaccggaaatctggattctgttacaagtatggaagtcgtaggattactaaaatcctgtgccgcaagatttcatcagacgacattgatcgtgacgcatcaagaggaagtagcgcagatggcagacagagtaatacgtatgtccgatgggaaaatctatacaagagattgtaacgattgttaggaggtatcactatgtttcataagaacattccaaataacaatgaagatataatccgattcctggctaaaaattttgcgggcacaaaaaaggtgagaaatacgattttattttgctcagtagtaatcggtattgttgctataaccatggtcttcggaatctcctgtggaaaaatacaagcagaagaaataagattaacccgagaaaatggaactgcttcttcgggcagaatagaagacggaacagaagaacaatatgcaaaattaaaacaactggattatataaaacaggttgggaaaagcatttttgtaggtgaagctacagacgtttcagaaaataatgaaaaaacgatatgtgatgtagtatgggctgactcagaaagctggaacaattttttgaagcctgcatataccaatgtgattggaaattacccacagaaaaaggatgaaattctattatctgagagagcattgaaaaaacttggtatttctgaaccagaacagggaatggaaataaacttagatgtatacaaaggtctgttcgaacattcgaaagaaaaattcaaactatgtggatggtatacggactctggaaataaattagcaatcggatatatttcacatgacaaaattaatgagttaaacctggaaaagggtccctatactttacttttcagtcagagcaatcatttaagcagaagcaaaacagaagaaaaattatatcaggcattgccgatgaagagtgcagatcagaagatatacgtttctgatacagcacaatatactgccgtttctaaattcgcaggtggatatgagatggtgatattgggaacgataggtattttgtgcggaatttatttccttgtgcgtaatgttctttggatatccatgagtgaagatattcaaaatctcggattactccacacgattggagccacagaaagacagatcacaaaaatataccggaaacaaatgcggttactcatgttaaaaggttctgtcttagggagtttgatttctgtattgattttggtcttattgataccggaaatattagggtttcatttttatcaggaaatgggaggaaatatgatactttcctttttcagaccatggattctttttctttctgttgtatttgtaaatggaattttgtggatagcatcagaaggcgttattagaaaaataacaaatctgtcttgtatcgagagtgccacttatgatggaaatatgggtgacagaaaagtaaaacatcctggaaaactggtgttgaaacgctctgagacaggagaaatgttttatattgcatggggaaatataacacgtcataaagcacgatttatcattacaagtatttccatctttttaggagttctgtcttttattctaatgaatgtacttacaaatggatgcgattataagcatcttcttgagaaacgccctgattttttgctggcaggagagtttagcgaattcgggaaaagccagggatgtggggaagaatataaaaccagagaaatcgatgttgatcctttgttaacacagggagacggtgtggaactgttgtatgacaatgattatgatgaattttcaccaatttctcaagagttagagaaaaaactacacaagatagatggtattgattgggagaactccaatctgattgaaggagcctatgtagatacggttatatctaagaaaggcattcgtccctatgacgaggggctttcgaatcttacagatgacaatatggtggaaggattcagttgggatactgtgcagattttaaatgacaatcaaatcttgtcgcttgagaaatacgttcaggataatcaactcaatattgatttgaaatctttggaagaaggaaatggcgtgttgctcatacatgatcatatgctgaccccggaacagcaaaaacttgcagatgaagcaattggcgaaccggtatactttaaaactttgctctcaagagaagatgcgattcgtagaaaagaactaatcaattcagagagtgaagagaaacaacagaaagacgaatttcctcaaaaggaatccgaaacatttactctatgcggttatttagacaggcaaagtgataattttccagaaatacatcaatcctggcatggagaaggaatcttatattattttattagtgagaaaggctttcaaaagataccgacggagaaaaagagattaacaatggaattgactgctgatccgggaaaagaactttatgtgaaaacacagatcaacgagctgatatccgaggaaaataagaaacgatccgaaatgacagaagtatcaatggatgaaggaaccggcgaagcaggagtttttgttatctgtaaatcagatctgatgcagcaaaaagaaacatatatgagaggaaatcgaattctcttaggtgctgtaagtatcatattattcattgcgggattgactaattattgtaatgttgtatttaccgggatgtacactcggagaaaagaatttgatattatgaaaagcattgggatgaccgataagcaaatgaaattaatgctttttggagaaggcagttattattttatgtgtgtgataggattgttgtttactgtaggaatggtcactttggttggagtaaagatttatatggaaaataaattgtcatattttacatttcattggccgatttttagtactgtaggtgtaatgttttctttagtgcttattaatgttatggttacacatttcatatgtaagaagacctgaaagggaaaagcctaagtgggaagataccatcacaaaccgaatgatgcactggtcatatacaccggaatagaaagaagcagtaggatatcgcataggcacagtggatatgatatactgtgtctatgcgatataaaagaaaagtacaatgtgaatttatggagagattatgatgaaaaaatcattatcctattctgcaataacgcttgcagtaactcttgttattggtcagatattacttattttgttttctgaaggaaattcaattggttcctctgtcttgtttattttaatgaacttaacgccaatgcttgttgcgattgcttttgcaaaatcagatgggcagaaagcagtgctcaaagatatgtttttgcagagagagtccatctactcatatatcttggcaattggtagtgtatgcgtatattatggtgtttcatttataatgggaaatatatcgttgacgggcggaacaattatttcagtattggtatatatgccatggacaatcctgcaaggtggattagaagaatgtggttggagatggtatttgcaaccaaagtttaatataaagtcatatgtattaaaaatgttcttaatatcaatcgtgtggtttttatggcacattccaatttatagattaccttggattacagctggatctagtaattatctaatattctatctaatgatattaggaaatacatttatgtttggaacaataaaagaatattccaaaggtgtgttaccctgcgtaatcgcacatattttaatagattcgctagctgcagcgatgcttgtaggaagcaatattgttaaaattggaatattggtagcgtttgaaatagcgatatctatttttatagttaaagcaaaaataataacaagaatcattactattttattgacagaactattaaaatgatatataatccttattaagaacaaatcctaataaggagattcgatgacaaatagaagaaatactattcagaaagatctcgtacgaaatgccgtatataagatgaaaaggcatgttacagcaactgaagtgtatgaatttataaaagaagcatatcctacaatcggaaaaggaggcagttggacaaacggaggatggtcagacgatatggcgttgcagaatctgtggatatgaatatgtagacgaagaattaccggatgattttatatgtcctttgtgtaagcacccggcatcagattttaaaaaagtagtgaagaaaacggaggtaaaagaaatgacagcgaacaaatacgcaggaacacagacagaaaaaaatttacaggaagcatttgcaggggagtctcaggcaagaaataagtatacctattttgcttctgtagcaaaaaaggaaggctatgaacagatgtcagcattgtttttaaagaccgcagataatgaaaaagaacatgcaaagatgtggttcaaggaattagcaggaattggagatacaaaagaaaatttagtagcagctgcagaaggtgagaattatgagtggacagatatgtatgaaggctttgctaaaacagctgaggaagaaggttttcatgaacttgcagcaaaattcagagctgtaggagagattgagaagcatcacgaggagagatatcgtgcacttcttaaaaatattgaaactgcacaggtatttgaaaagagcgaggttaaggtatgggaatgccgtaactgtggacatattgtagtaggaacaaaagcacctgaggtatgcccggtatgtaatcatccgcagagctattttgaagtgcatgcagagaattattaagaaatcagctgaacttgttgaaaaatttatgaaacatcattgacagaacatataaagaaatgcatagataatggtgttgtacagcaattatatttgcgttacaattaaagagattggaggtgaaatcgtgaaaactcataaatattgggcagtaggtgcattagcatgtatggttgctacattttataccggcttcagaggaaagatgaaggaacataagatttttgcgattggagcaatgggatgtatgttattttctgtactctctgggtataagatgatttcgggcaaaggtgcagttaagaaaagtgaagaagtagaaaagaattagaatatttatgcaatttggtaacttatatgaggtggattgtaaggtggttttatgacagtaattacatttgatgataatttaataacaggcaataagacaatagacgagcagcataaggaactgattgatcgtattcagcagtttgtgagtgcatgtgaatcagaagatgcaagagtaaaggcaattaaaatgcttgattatcttgatgaatatacggaatttcatttcaaagaagaagaaaaactgcagaaagatgtaggttacccaggcttggaggaacatataaagaagcatgaggagttcaggcatactgttaaggtactctatgattatctggatgaaaatgagggaccagatgaaaagtttatggaacaggtaaaaatcaatgttattgactggctgtttggtcatatcaagacatttgacagatctgtagccgaatatataaatatatatgataatcctgacagattatagaactgtttgttatgcaattatattttaataatgtatgccccagtcagaccaaatactttctgcaaagcagcagatatacttgcagataagtgtggatgtgatgtaattgcacgatttgagactaatagagatgctgtagaaggtgacaatttaataaagttacaaaaaaggtattcagatgagtgttacgtatctgaatatctttttttataattgtgcacataattaaatatatgcttgacagaataaaaagaatgatataaaatcctaattaagaataaatcctattaaggaggctgaaaaaaattagaaatacaattcaaagagatatggtacttgatgcagtaaatgaaatgcaccgtcatgtaacagcagaccagatatatacatttataaaagaaaaatatccatctatcggaagagggactgtatatagaaatcttggcattcttgtagaagaaggcaaggttagaaaagtggaagttccagatggttcagaccgctttgactttacactcgaaaatcactaccatgtggaatgcgtaaagtgtggagagatatttgatgttgatatggatgttatatcagagctggagaagaaaataaaagacacacatggaatgaagtatataagccatgacgttttttttaagggcatctgccaggaatgtcagaagaaagaaatgaaagatgcatagattggagaataaaaatgttagaagtaggaacaaaagcaccggattttgaattaccggatcagaatggagaattacataaattaagcgaatatcttggaaagaaagtaatcctatatttttatccaagggataatacacctggatgtacaaagcaggcttgtggattttcggatagatacccacagtttgttgagaaaggtgcggttgtacttggcgtaagcaaggattcagttgcatcacataagaaatttgaggaaaaatatggactggcatttacgcttttatcagatacagagcgcaaggttattgaatcatatgatgtatggaaggaaaagaaaaactacggaaaagtatccatgggtgtggtcagaacaacataccttattgatgaatatgggataatagtaaaagctaatgataaagtaaaagcagctgatgatcctgaaaaaatgctgcaggaattaagttgatgaagattatattatcacccgctaaaaaaatgaaaacagacactgatagcatagggatattatcatgtccggtattcatggaaaaaacagaagagatacttagctggctgaaaggaagaaccgaagaagaacttcaaaaaatgtggaagtgcaatgacaatattgcggcacagaacatagagagaattaattctatgaatctgtataaacaacttacacctgctgttttagcttacgagggcattgcctatcagtatatggctcctgtagtttttgaagatgctcattttgattatgtgcaggaacatttgagaataatgtcagcgttttatggggtattaaaaccgatggatggtattacaccatatcgactcgaaatgcaggcaaaggcttcaatcgggcattataaaaatttgtatgagttctggggtgagatgctttacagggaagtaatggatgacagcggaattatcattaatctggcttcaaaggaatactctaaatgtattgaaaaatatctgactccagcagacagatatattactattactttttgcgaaaagtctggtgataagcttatcacaaaaggcacatatgctaagatggctcgtggtgaaatggtaagatatatggcagagaatcatatagaaaaaccagatggtatcagaagttttaacagacttggttatgtattcagaggcgaaatttcgtcaggtaatgaatacatatttgaaagaattgtagaataacaaaaggaagggatgattgcatgaataagaaaaaatcaaattcaaaaaaggcagttatgataggctgcggattcgtaggctcagcatctgtatttgcgcttatgcagagtggattattcactgaaattgccttgatagatgcggataagaataaggcagagggagaggctatggatatcagtcatggaataccatttgccagccctatgaaaatatatgctggtgattatgatgatgtggcagatgctgcgattgtaattatatcagcaggtgcagggcaaaagccaggagaaacaagacttgatctggtaaataagaatgtggcaatatttaagtccattattccggaaattgccaaaagagattttggaggaatccttctggttgtagcaaatcctgtggatattctgacacaggttgcaatcaaactgtcaggacttccggaggagagagttatcggctcaggaacagttcttgacagtgcaagacttagaagcaagcttggacagcatttatcagtggatagccgaagcgtgcatgcatttatagtaggagagcatggagacagtgaagttgtggcatggtcatctgctaatgtatccggtgttccgcttagtgacatgtgtgagatgagaggtcattataaccataaggaaaatacgaaggaaatcgcagatgctgtcaaaaacagtgcctatgagattattaataagaagcatgcgacatattatggaattgcaatgtcagtaaaacgtatctgtgaagtaattatgcgtgacgaaaaatcaatacttcctgtatcgcacatgatacatggagtatatgagattgatgatgttgtattaagtatgcctgtcattgttggtgcagacggaattgaatctgatataccgattaatcttagtggagaagaagcattgaagctaaaagaatcagcagacgcattaaagaatataattgacacattagagctgtaaatagaaagggtatagttatttaattcccattttcaccttggggaaatattacgaggaagatgggagaattgtgcttcctttagcagttcaagttcatcatgcggtatgtgatggatttcatatctgccggtttgtcaatgaactgcaagaattacgcaattcgtgttaaattttcaaggtacaaataaaatcatatattaattaacgtgtcttttgccccctaatcaggatagataaaaaatttcatcaagagcctgtatttatgaccttcatcttttgaatatatgtaaggacattctttgagccggcataaaaatattttttacaacaattattttcagtgtgacaagagatgaaaatgaatattcacaaaaataagatgctatggtataatacaaggtactgtattagggcttcttatgagaggcgctgaaatatgggaaaagatttaaaaggttacaagaatgaaatcagtatcgttttatactacaaaccggattgcgaacaggcgaattggtaggattgaaatctaaggatttataggaggaatatagaaagatgaaacttggaatcgtaggattaccgaacgtaggaaaaagtacactgtttaactcactgacaaaggccggtgcagaatctgcaaattatccattctgtacaattgacccgaatgtcggtgtcgtaacagttccggataagagactggatgtgcttggagagatgtatcatacaaagaagatcattccagcagcaattgagtttgttgatattgcaggacttgtgaagggagcatccaaaggagaaggacttggaaaccagttccttgccaatatccgtgaggttgatgcaatcgtacatgttgtaagatgcttcgagaatacgaatattgtgcatgtagacggaagtattgatccgctgcgtgacattgagacaatcaatcttgagctgattttctcagatcttgaggttcttgaaagaagaatctccaagacagtgaagctttctagaaatgataagatggcggcgaaagagctggatcttcagaaccgtttgaaagcacatctggaagagaataagatggcaaagagcttcgtgacagaggatgaggatgagcaggcatggcttgccgagtacaaccttctgacagcaaaacctgtaatctttgcagcaaatgtatctgaggatgatcttgctgatgatggtgtgaacaatgcaggggttcaggcagttcgtgagtatgcaaaagaggaagactgcgaagtgttcgtagtatgtgcagaaattgaagaagaaatttctcagttagatgatgatgagaagtccatgttccttgaagaccttggattagaagaatccggacttgagaagctgatcaaggcaagctatcatcttcttggactgatcagttatctgacagcaggggagccggaagttcgtgcatggacaatcaagaagggaacaaaggcaccacaggcagctggtaagattcatacagactttgaacgtggatttatccgtgcggaagtagtaagttatgatgatctgatggcatgcggaactcatgcggcagcaaaagaaaaaggattagttcgtctggaaggaaaagactatgtcgttcaggacggagatatcatgctgttcagatttaacgtttaacagatatagggaatatgcttgaaaaccagttagattcattgttttctaattggaaaagcagtaaaaacaggaatcaggaacaactggatttgttcctgatttctgtggatatgaaaggaaataacataatatgcattacaatatcagctttccaaatttagggatttatctggatcatgtaggaaaaagcatcagcatctttggattttcaattgcttactacggcatgattatcggtgcggcaattttgattggatttttgattgccacagtggaagcaaaaagaacaggacagaatccggaagactatctggatatgggaattgtcggagtaattgcaggaattgcaggcgcaagaatctattatgtgattttctcctgggatttatataaagataatcttttgtctatctttaatctcagagaaggtggtctggcaatttatggtggcgtgatcggagcagtgatcgcagtttttgtgatggctgctgttaagaaaaaatcaccatttcagattttggatacaatcgcactggcacttctgaatggtcagatgcttggacgttgggggaatttctttaacagggaagcatttggagaatatacggattgtctgtttgcgatgaggcttccggttgatgcagtaaggccggaagatatcacagaacttatgcgtgagaatatgcagagaattgatggagtcagttatatccaggtacatccgacatttttgtatgaatcattatggtgtgccggactgcttattatattgtttctgtataggaaacataagaaatatgaaggtgagctctttcttatgtacctgtttggttatggggcaggacgcgtgtggatcgagaggcttagaacggatcagcttgttcttccggggatcggatttccggtgtcagaacttctggcaggttgtctggtgattatgacaggaattatgctgatctattgcagaagacattgcagaaaaaaaaacgagaagaaaaaagtggatcagtatgagccggtgccaacaaagatcaaagggaaaaaaccaccgaagtgggatgaccggttgtttaagaatagatagaataataagaaaaaagtatagtgattcataagtcagaagagttaatgttcaacagaaagtactcttctggctttttctatttctgcctgttttagttaataatccccaataacagcactgataactattctcaaaacactgctctgcacacgaaaatatacaaaagaggatatttataactctagacttttgtgacttttggagatataataaaattacatgtgaattaattatacttaactcagtgtaaaacctatgtaacacctaaggaggaataaaaatggcaagaaaaatgaagaccatggacggtaatcaggcagcagctcacgtttcttatgcatatacagaagtagcagctatctacccgattacgccttcatccgttatgccggagcatatcgatgagtgggctactgaaggaagggagaacattttcggacagactgtacaggttacagagatgcagtccgaggccggagcagcaggtgctgttcacggatcattagcagcaggtgctcttacaacaacatttactgcttctcagggactccttcttatgattcctaacttatataaggttgctggtgagcagcttccgggagtattcaacgtatctgcccgtgcacttgcaagccacgcactgtcaatttttggagatcattctgacgtttatgcatgtcgtcagacaggagcagctatgctctgtgaatccagcgtacaggaagtaatggaccttactccggttgctcattgtgcagcacttgaaggaaagattccattcatcaacttctttgatggattcagaacatcacacgagattcagaaaatcgagacatgggattatgaagatctgaaagacatggtaagcatggaagcaatcgacgagttccgcgcacatgcacttaacccgaaccacccatgccagagaggttcagctcagaacccggatatcttcttccaggctagagaggcttgtaacccattctatgatgcacttccgggaatcgttcagaagtacatggataaggttaatgagaagatcggaacagactacaaactgttcaactactatggagcagcagatgcagagcacgtgatcgtagctatgggatctgtttgtgacacaatcgaggagacaatcgattacctgacagctgcaggagagaaagtcggagttgttaaagttcgtctttacagaccattcagcgcagaagctctgatcgacgctatcccggatacagttaagaagatttctgttcttgacagaacaaaagagccaggagcacttggcgagccactgtacctggatgttgttgcagcacttaaaggatctaagttcgatgcagttccggtttacacaggacgttatggacttggttctaaagatacaacacctgctcagatcgttgctgtataccacaacgatgagaaagctaaattcacaatcggtattgaagatgatgttacacacctttcacttgatgctggtaagccacttgttacaacaccagaaggaacaatcaactgtaagttctggggacttggagcagatggtactgttggagcaaacaagaactccatcaagatcattggtgataacacagacatgtatgcacaggcttactttgattatgactctaagaagtccggtggtgttacaatgtctcaccttcgttttggtaagaagccaattaaatcaacatacctgatccatcaggctaactttgttgcatgtcataacccgtcttatgttaacaaatacaacatggttcaggaacttgttgatggaggaacattccttctgaactgcccatgggatatggaaggacttgaggaacatcttccgggacaggtgaaagcttatatcgctaaccacggaattaaattctacacaatcgatggtatcaagattggtaaagagatcggacttggcggacgtatcaatacagttcttcagtctgcattcttcaaacttgcagctatcattccggaagaagaggctattgaccttatgaaagcagctgctaaggctacttacggaagaaaaggtgacaagatcgttcagatgaactacgatgcaatcgatgctggtgcaaaacaggtcgtagaagtagaagttccggaaagctggaaagatgcagctgatgaaggacttgctacaccacatatcgcagacggcggaagaaatgatgcaattgcatttgctaagaatatccaggcaaaagttaacgctcaggaaggaaatacactccctgtatctgcattcaatgattatgttgatggatctacaccgtcaggaacatctgcatatgagaaacgtggtatcgcagtagatattccggtttggaatccaaatcagtgtatccagtgtaaccgctgtgcatatgtatgtccgcacgcagttatccgtccggtagctctgacagaggaagaagttgctcaggctccagaaggacttaagacacttgatatgatcggaatgccgggaatgaagttcacaatgacagtatccgcttacgactgtacaggatgtggatcttgtgtgaatgtctgcccaggaaagaagaataaagagacaggcgaagttgagaaggctcttacaatggctaacatggaagctaatgcaggagagcagacattcttcgactttggtagagagattccggttaaaccagaagttgttgctaaattcaaagagacaacagttaagggaagccagttcaaacagccactccttgagttctcaggagcttgtgcaggatgtggtgagacaccatacgctaagctgatcacacagctgtttggtgatagaatgtatattgcaaatgcaacaggatgttcttctatctggggtaactcttcaccgtctacaccttacacagtaacaccggaaggtaaaggacctgcatggagcaactccctgtttgaagacaacgctgagttcggatacggtatgctgcttgcacagaatacaatcagagacagactgaaagcgaaagttgagaagatcgcagagaagactacagatgaggcagttaaggctgcagcagctgagtatcttgagacatatacagtaggcgctacaaacggaacagctacagacaaacttgttgcagctcttgaagcactcgattgcgattgcgaagagagagcagaagttctgaagaacaaagatttccttgctaagaaatcccagtggatcttcggaggagacggatgggcttacgatatcggatacggcggagttgaccacgttcttgcaagcaagaaagatatcaacattatggtattcgatacagaggtttactccaacacaggtggacagtcttctaaggctactaagactggtgctacagctcagttcgcagcaggcggaaaagagactaagaagaaagaccttgcaggaatggctatgacatacggatacgtatacgtagctcagatcgctatgggtgctgacttcaaccagacagttaaggcaatcgctgaggctgaggcttatccgggaccatcactgatcatcgcttatgctccatgtatcaaccatggtatcaagaagggtatgagcaaagctcagacagaggaacagctggcagtagagtgtggatactggaataacttccgttacaacccggctgcagagggagacaagttctcacttgacagcaaggctccgaaggcagaaggataccaggacttcctgaatggtgaagtacgttacaacgcactgaagagagctaacccggctaaggctgacaagctcttcgctctcaatgagcaggaagctatggagagatatgattacctgaacaaactggtaactgtatacgctgcagaaaaagaagataaataaggatatttcatgagtaaatgagatatgaaaagaggagatctccgtaaggggatctccttttgcgtgaaaaaataatggatgttaacctgtttcgcaatttttgattacagtggtgcgcgaagatatttcttcggtgtcattcctttatattttttaaatgttttgataaagtagcttacatcgttaaatccacagctaagtccgatgtctgcgattgattcattcgaagtaacgagcttgaaacaagcttgttctattctatagtaattcagatagtcaacaggagttctatgggtcatatctttaaagtagcgacagaaatattttgaattcataccggcggcctgagacagatcttccagtgtgatacagtcagcataatggttttcaatcacttcaagagctttctttaaatgttctatttttcggctatctttctgactgataatccgtacgttttcgtacatcttattctctaaaatataacctagaaattcaaaaagagtaccgattactataagctcatgtccctctgtgcgtttttttacatgttcgaacatcagggaagtgatacgctccagatttttaaccggagaaggaatgtgagatgggattgttaaagtgtcacttccgatcttcttgagcagacgttcgctggcatgatttactgccatgagcgattcaaggttaaaaacaaggcattcatagacacaatccttaggaattccgccatgaagaagccctccttttataaaaataaggtcgccggctactgcagtgaattcattttcaccaattgacataagtaatttcccttttaaaacacgaataagttcatattcgatgtgccagtgataagacatttcataccgtggatgattcggcgtaacatgataaaattcaattggaaaatcaatggttccgtgattacgttcttctctgtaattgatgtatttcatgcaataatctcctttaaaaatctaaatagtgtaaaaacaaacacatatgtggaaatatatgtttataaattgtactttgttgtataaaaggtgaatatctttatatttttattctagtataccacaagacaaaaagaaaggaaagaactataatgatactcaaagaagcggttctgcgaaggaagataagcagagcaaggcaaacaattaaggaggaatgtaattatggcagaaagaagattagtaggatcttatccagtaattggtatcagaccgacaatcgatggacgtagaggagctcttgacgtaagaggatctcttgaagagcagacaatgaacatggcaaaatctgcagcaaaactgtttgaggagaacttaagatattcaaatggtgagccggttaaagttgttatcgctgacacaacaatcggacgtgtaggtgagagtgctgcttgtgctgataagttcagaagagaaggcgtagatatcacagttacagttacaccttgctggtgctacggagctgagacaatggatatggatccacagacaatcaaagctgtatggggattcaacggaacagagagaccgggagctgtataccttgcatctgtacttgctacacatgcacagaagggacttccggcattcggaatttacggacatgacgttcaggaagctgacgacacaacaattccggaagacgttaaagagaaacttcttagattcggacgtgcagctgttgcagcagcatccatgagaggaacatcttaccttcagattggatctgttacaatgggtatcggtggatctatcatcgattctgatttcatcgagtcttaccttggaatgcgtgtagagtctgttgacgaggtggaaatcatccgtcgtatgtcagaagagatctatgacaaggctgagttcgagaaagctcttaaatgggcaaaagagacttgcaagattggttgggataagaacccagaagagcttcaggcttctccagaggagaaagaggagcagttcgagttcgttgttaagatggcagttatcatcaaagaccttatgaacggaaataagaaccttgacgagaaattctcagaggaagcaatcggacacaacgctctggcagctggattccagggacagagacagtggacagacttctatccgaacggagacttcgcagaggcagttctgaatacatctttcgactggaacggagctcgtgagccatacatccttgctacagagaacgacgttctcaacggacttggaatgatgttcatgaaacttcttacaggacgtgctcagatcttcgctgatgttcgtacatactggagcccagaggcagttaagaaagctacaggatatgacctcgaaggtgttgctaaagagaacggtggattccttcacctgatcaactctggagcagcttgtcttgatgcatctggtgttgctaaagacgagaatggtaacggcgttatgaaagaatggtggaacgttacagaagaagaccagaaagcaatcatggatgctacagagtggtgcatggctgacaacggatacttccgtggaggcggatactcaagccgttacgagacacgtgctcagatgccagctacaatgatccgtcttaaccttgtaaaaggacttggaccggttcttcagattgcagaaggatggacacttgaacttccggaagaagtatctgataagctttggaaacgtacagactacacatggccatgtacatggtttactccaagatgtgatggtaaagagggagcattcaagacagcttatgatgtaatgaacaactggggagctaaccacggtgctatctcctatggacacatcggagctgacctgatcacaatgtgttcaatgcttcgtattccagtatctatgcacaacgtaccggagaaagatatctaccgtccggcagcatggaatgcatttggaatggataaagaaggcgctgacttcagagcttgtaagaactacggaccactttacaaataagatggagtccttttgtcagaaaatgtaaaaagactgtaaatacagtttcgatacagagctagaacaaagaatgcggggggtctgcctatgcagggcccccgttttaataccgactaaaagagtattaagaaaagaggaagattatggagaaaaaagtattagcatttgactttggtgcttcaggcggaagagcaatgtgcggaacttttgatggtgacaagatcagcattgaagaacttcaccgtttttctaacgatccggttattttgaatggatcaatgtactgggatgtactgagattattttttgaaatcaaacagggtctgatcaaagcaaagaaatgtggaaagatcgaaagtatcggtatcgacacatggggagttgattttggactgatcgacgaggaaggaagacttcttgaaaaccctgtacattaccgtgatgcacgtacagaaggaatgatcgaagaaagtttcaaactgatcgataaagagaaattctaccagatcacaggaaatcagttcatggatctcaacacagcattccagctcctttctcttgtaaagacaagaaaagagcttcttgagaaagctgacaagatgattttgatgccagaccttttcaactatttccttacaggggagaaaaaagctgagtattctatcgcttctacaacacagcttcttgatgcgaaaaagggcgagtggtcagatgaagtgatcgaagcactgggaattccgaaacatattttcccggaaattgtacctacaggtacaaagatcggcactcttacagatgaaatctgtacagagcttggtctggataagattgatgttatggctgttgcaggacatgatacgcagagcgcacttgtatctgtaccaacatcagaagaagattttatcttcctgagttgtggaacatggtcactgcttggaacagagcttgcagaacctatcatcaatgagaaatctgagcattacaacatcacgaatgaaggtggatatggaagaaagatttccttccttaagaatatcattggattgtggtgtattcaggaaagccgtcgtcagtggatccgtgaaggaaatgagtacggatttggcgagcttgagattatggcaaaagaagctccggcacttcagagctttattgatccggatgcaccggaattcacacctgccggagatattccgacaagaatccgtgaattctgcaagaagacaggacagcctgttccggaaacagttggagaagttgttcgttgcatcaaccagagtcttgcaatgaaatatcgtcatgcgatggaagagattaaagagtgtacaggtaaagattataagacagtctacatggtaggcggtggaacacagagtgctcttctttgccagttcacagcaaatgcatgtggatgcagagttagtgcaggcccgatcgaggcaactgttcttggaaatattgcactgcagctcatggcttccggagatatcaaatttatcgaagaagcaagagaaattatcaaacgttctcaggacatcaagatctacgagccacaggacaaagaagcatgggacgaagcatacgagagatttaagaaaattttagtatagtgctttgaactaagggggaatgagttgccagttgtagtgtaattatggcgttgctggtcgcacatcgtgtgaacagtaacattatggctggcaacgtaataaaaaagaattcttcagaaacacttgactgtcaatctgctgtatgatttaatggaatgagcagttgagttgggcaaaatgcataacggttcgctgattggcctgggaggagaagattatggctgctactattcgcgatatcaagaaaaggacaggattatcccttgcaacgatatcgaagtatttgaatggcggtaatgtattgccggaaaatcgtatcttgattgaggaggcaatcaacgaactgcattatgaagtgaacgagctcgcaagagggcttgttacccacaagacaaagacgattggagttctggtttatgatatacagtgtctttttgtaggaagtatgctgcattatctgggaatggaacttcataaaaagggatatggaatgttgatctgtgattcctgcaatgacgagaagctgcagaaagaaaatctgcagtttcttctgagcaggaaagtagatggaatattggtatttgctgtaggtatgcatggaaagtttcttcatgctgcgaaaaaagcaaatgttccggttgttctggttgacagatcattccaggatgaagaatatgattgcgttgaggttgataaccggacagcaatctatcgtgcaacaaataaattaattgagaaccatcacaagaaaatagctgtgattgcctctaatattgaatataccggaagggaacgtgtgaaaggatattctgatgcgatgaaccaggcaggactggagattccaaaggaatactgtaagctgggagggcattcttttgaacatgggtacagaggaatgaaagaacttttggagcttgaagaccgtccgaccggtgtgatcttaggaaactataacaccatgcttggtggaattatggcattgaacgaatcaggactctcctgtccgcaagatgtctcgctcatcggagtggataatcttccgatgacccaggtgctgcgccctaaattatggctgattgtccagccaatggaaacgatgtgcgagaaggctgtagctatgctcctggagcgagtaaacggagagcaaaacggtatgccggtaaaaattagtttcagtacctctgtaagagagggagactcaatacgagaccttggatagtgcataagcaaaatgcacagaaaagcgtggtttttgttgtgagaatggataaaaaaatagtgaaaacaaacaaaaacgaaccgtttcgctctaaaaacggtgggaaatcttgacaagatatgaaaacaaggctataatttattcttgtattaaaggtgtgcgggaaaattgaaaacacactttgaaaaacaaaaaaatcttaaagctttgaaagcgaaccgttacgctgaggttaagaggaatgggggtatcgtaagagttaatcgacaatccagtcaacaccagcaaagtaaaagatgggaggaagaaaattggaaaaaattaaacaaaatccttttgtaaaaaaggtaggatttaacagaattgttttgtgctgtgtccttcttctgatgtacggactcttctgtgcactgaccggaggaagcttcgcaggaatgaaccgaatcatgagcgcactcaattatgcttatttccttggatttttatcactgggtgttacatttgtaattgctacaggagagatcgacttctctattggaccggttatgttctgttgtgcacttatctcaggttatacactgacaacacatggaatttccatgccggttgcaatcctgatcagtatccttgtgggatttgcttttgggctctttaatggatacctggtagcttactggtcagtaccttcattcatcacttcaatggcaagtatgaatattgcaaaaggtcttgcgtcagtttacacaaagacacagtcagtcagctggccgcaggcagcagatccggacaacggatggttcagaaatcttgtaagatataacgggttcccggttggacttgttattcttctggtagctgcagttatctgtgcgattatcctgaacaagacaagaatcggacgttacatcctttgccttggtagtaacaaagaagctgttagactttcaggtgtagatgttaagaaatgggaaatgcttgcattcattatctgtggagttctcgttggaataggcgctatcttctatgtatctgcatatacaacagtacagcctggttatggagatcagtacaacaacgaagcaatcgccggatgtgtaatgggtggtacatccatggcaggtggacttgcatccatcagcggtacaatcattggtgtatttatcatcgctcttcttcaggaaggaattctggctcttggctttacaaaagattatcagcttatcattacaggtgttattgttatcgtcgcagtattcagtgacgtacttgcaagacgcagaaagaactaatttctcttctatattaagagatcagctttatgaatgatgaacgaaatgtttgattgaaagaaaggcaagggtaataaaatgggcgaagttatattggaaatgaaagggattgataaatctttcccaggtgttcacgcacttgaccatgtagatcttgagatcagaaaaggcgaagttcttgctcttatgggagagaatggtgccggaaaatcaactctgatgaaagttctcacaggtatttatacaaaagattcaggaacaattacatatgaaggtaaagaagttgagttccatagtgctcgtgaagcacaggacaatggtgttatcatcgtacaccaggagctgaacatgcttggtcatctgacagttgctcagaacatcttcatcggaagagagttcaagaagggcatcaagatcgatgacaagaaaatgaacgaagaagcacagaaactgttcgacagaatgaacgttgatattgatccgagagagacaatgtcaaaacttacagtaggtaagcagcagatgtgtgagatcgcaaaagctatttcacatgatgcaaagatcatcatctttgacgagccatcagcagctctgacagagacagagatcgagcagttgttcaagatcatccgtgacctgaaaagtcagggaatgggaattgtttatatctcccaccgtatggatgagattaaagtgatcacagaccgtgttacagtcatgagagatggtacttatgttggaacattgatcacaaaagaaagtacaaaagacgacatcatcaacatgatggttggacgtgttatttacgaagatccgaaggagaagaacatgacacctccgggagcaccggtagttcttaaagttgaacacctgaacgctggtaagatggtacaggatgtaagcttcgaacttcacaaaggtgagatccttggattctccggactgatgggagctggacgtacagagacagccagagcactctttggagctgacccgatcgacagcggtgatatttatatcaacggtaagaaggttacaatcaagagcccacaggatgctgttaagtgcggtatcggttatctgtcagaggacagaaagagatatggtattgttgtacagaaatcagttgctgagaatacaacaatggcaacacttgaaaaattcatgagcggtccttttatcgataagaagaaagagaacaagattgctcaggaatatgttgagcagcttgcaacaaagactcctggtacagatcagctggtagttaacctgtcaggtggtaaccagcagaaagtcgttattgcaaaatggctgacaagagactgtgacatccttatcttcgatgagcctacaagaggtatcgacgttggagctaagaatgagatttacaagctgatgaatcagctggcagcagaaggaaaagccattattatgatttcctccgagatgacagagatccttcgtatgagtgacagaatcgttgttatgtgcgaaggtaagaagacaggtgagctggatatttccgaagctacacaggaaaatatcatgaacatggctacacgtgagattgagtagggagggaaaaagtaatggcaaataatacaacaaagaaggccggctctaataagtcatttattgacagaatgggaggacagaaattcatcgtcctgctcgttgttattgcactgtttatcttcttctgtgcaatgagccctaacttcagaaaatatacaacatttattaacattctggacttctcctattatattgtcctgatggcaattggagtagcctttccactgatgacaggtggtgttgacctgtcaatcggtactggacttgtatgttattcactcgttggtggatatctgatcgttcacaaaggaatgcctacaatcgttggtatccttgcagcaattattcttggaatgctgattggtgttctgaatggtgtactggtagcaatcatggacctgccggcattcctggcaacactttgtacttgtatgattactcgtggacttggttccattatcgtaggcggattcggaatctcatggccggcagcagcagcaccgggcggatggttcagaagtatcttcaagattcagtccggcggacagaatatcccgatcggtttcttatgggtaattcttctggttgttgttatgacatttgtactgaatcatacaagaattggacgttatacacttgcaatcggaagtaacaaagaagcaacaagactttccggagttaatgtaagattctatcatattgcagcatatgtaatctgtggattcttcgcaggacttgcttctatcgcatactccgctatcttcgctacagttcagccaggaagtggtgctggattcgagcttgaggctatcggtggagcaatcatcggtggtgtatccatgacaggtggtgtaggaagcatcacaggaacactgtttggtgtattcgttatctgtcttctgaagactggtctcccattcatcggactgacagctaactggcagcagatcattacaggatttgtcctgatcgcagccgtacttgttgatattcttaagagaaaagcaggaaaagagtaattttttccacttaaatttagaatttgtgaaaaatcacgaaaaagcaataattaattgcaaaaccattagtaatgtgttatattattaatgtgtgcggatagatagcagtggggaaacatgctgaaaaaagcgtgaaaaagaaagctgttactatagaagctaaacgaaacagactgtataaagagttttcggacaaagaagcctgggcaaactacttctgcagagcgatttaagaaatgcacgaaagaggctctgccagagaggcccggcattagggagaggaaaactggaagaaaactcagacaagcagtcacaaatttattttgtcaggaggacataattatgaaaaagaaagttttagcagttttacttggtggatgtatggtagttggaatgctcgcaggatgtggatccaaggcagatgacactaagaaagcagatggcgacactaagacagaaggatcaggagattccaagggatatcatttcgaagttgttgtaaagagcttccagtcttcatactggcaggcagctgtacagggaatcaaccaggcttgtgatgagctcggtgttacagctaacacaacaggaccgaacgctgagtccgatatcgctgaccaggttaacatgctgaacaacgcaatcaacaaaaatccagatggaatcgctcttgcagcttgtgaccagaactcagttcttgattcactgcagtcagcacttgacaagaagattccggttgtatgtttcgactcaggtgttccggacgctccagaaggatctgtatacgcaacagttgtaacagacaacgagcaggctggtggaatcgcagcagagcatatttatgaagcaatcaaagacagaatcggaaacggacaggttcgtgttggtgaagttaaccaggatgcaacatctgctaacatttctgagcgtggtatgggattcatcaacaagttcatcgagcttgctaaagctgatggaaagacagtagcagttgtaggaaatgacttctatgtaaaccaggtaaaagacaatggcgatcaggcatctgctgacgtagttctcgaagttgcagttccggcacagacaacagttgagctgtgtgctacagaggcttctaacatcatgaacaaagacgatacaatcgctatgttcggatcaaaccaggtatctgcagagggtgttctcacagctaaccagaacctgaacaaacttggaacagatgatgataagatcgttgcagctggattcgatgctggatcagttatcaaagccgctgttaaagatggtacattacttggtgctgttacacagtctcctctgatgcagggtaaaatctccatcgagactcttgctaagatctgtgatggtgagtctgtagaagacgttacaacagatggttactggtatgattctacaaacatggatgatgaggatatctctccaaacctgtatgactaattcatatctgtaaagagaagctgaattattaaagtgaaaagaaaggaatcgggaaattcccggttccttttttaaaataatatgttattatatcaaggaggaagataatatgttaaaaggaattccaaaaattttatcaccagaactgttgaaagtacttgctgagatgggacacagtgacagactggttatctctgatggaaacttcccggctgaatcaatgggaaaagacgcgattgtgatccgttgcgacggacacggagtaccggagattcttgatgcgattcttcaggtgttccctctggacagctatgtggagcatccggtaaatcttatggaagttatgcctggagatactgtggagacaccaatctgggatacatataaagagattatccgtaaatatgatgacagaggtgatgctgttgttggaaacattgagcgttttgcattctatgatgaagctaagacagcttatgcaatcattgcaacaggtgaatcagcactttatgcgaatgtaatgcttcagaagggtgttgtaacagactagtcacattttttaacgtaatggaggaacaatatgcttgatcatgtagaaaaaatatttgcagatatgaagccgatgatgaaaaagttgaagaaggcttcttataaagtaaatatggaggcttttatagagaatcatggacattatttccgtgagatgacagaatatacggagaatgcttctgataaagagacggcagccaaagagcttgcagtagactttacagataaggtttatgatgcatatgtttctccgaaaaaaggaaaaatagacagtgctgtgcagacagatctgaatttctttatgatctattatgtatttccggcaattcttttgacagagcatgacgatgcgaaactgatcgcagaccatctctgcagcagatggggagaaaagtttaagaacagtaagattcagtatacagattatgattccctatatgtttcattccgtgagaagatatttggaatcttttaatacttgcaaatcaaccttacttgtgatagaataattaagattcatgtaatggcatgagaagattttagaagctatatttttatggtttaataagtgtgctgttacgttagtgtgtaggaggtcatagaagatggacattttgaagattgttttatacattatctttgttatagactgtatcgcattatcagcgattattcttttgcaggaaggaaagtcagccggattgggaacaattggcggtatggcggatacttattggggacagaacaagggacgttctatggaaggtgcacttgtaaagtctacaaagtttcttgctatccttttcctggtgcttgcagtagtactgaaccttaaggtttttaattaataacagatgatgaagtaagtataagacattctataataagactatagaatgtctttttttactttaagtagtgatgaaaggttactgttcactcccgtgtcaatcactccgctgattgacacggaggatgcatgttttgacttgaatgcatctcgccccatcgccaaaggcgatttaaaatggcgagatgcgttgctggtcgcacatcgtgtgaacagtaacgatgaaaggaaacagaatggatcagacatttgaaaagagaaaaaaagtgatttatgactttatttgtgatgatttttatatcccaatgaaagtcaaagagattgcgacagttcttcaggtatcgaaagaacagagaagagagcttcaggaagtgttggacgctcttgttgaggaagggaagattacactttctaaaagaggaaaatacagtaaagggcagacgaagcgtatcacaggaaccttccaggcgaatatccgtggatttggatttgttatgctagagggtgaagatgaggatatctttattccgggagagaatgtgaacggtgcattccagggagatgaagtggaatgtattattacaggtgcgcctggaggtaagagaaaagaaggaaaaatcgtaagaatcgtgtcgcatcaggtgaagaagattgtcggattgtatgagaagagtaagagttttggatttgtacgtccggataatcagagatatctgaaagatatttatattccggccggaaaagagatgggtgccatggacggtcataaggttgtggtagaactgacatcttatggacaggaacatgctaagccggaaggaaagattgttgagatcatcggtcatgtgaatgatccgggagcagatattttatctattgtaaaggattatgatcttcctacagaatttccggagaaggtattgaatcaggcggttcgtgttggaaaagatgtatcagaagcagattgtgcaggaagattggatttacgtgactggcagatggttacgatcgacggtgaagatgcgaaggatctggatgatgcggtttctctgacaatgaaggatgagaattatcagctgggagttcatattgcggatgttaccaattatgtacaggagaaaagtgctctggatcgagaagcactgaagcgtgggacgagtgtttatcttgctgaccgtgtcataccgatgctaccgcatgtgttgtcgaatggcatctgttctctgaatgcaggggaagaccgtctggcattatcctgtattatgacagtgtctccgaaaggcgaggtgatcgatcatcagatcgcggagactgtgatccgggtagacaagcgtatgagttatacaggtgtatctaaggtgctggcagaagaaccggaagcactggaagaagataaggattttgttccgatgattcagaagatgcaggaactttcaacgattctcagagaacgacgcggcaagagaggttcgattgattttgattttccagagacaaagattgaattggatgagaaggggaaaccaattaatatcaaaccttatgagagaaacagtgcaacgaagatcatcgaagattttatgcttcttgctaatgagacagtggcagaagaatatttttggagagaggttccatttctctacagaacgcatgaagttccagacgaagagaagataaagaaactgagtacatttatcaataatttcggttatcatattcatgtgcatgatgaagtaaagccaaaggagattcagaaacttcttagtcaggtggaaggaaccccggaagaagctctgatcagcagacttacattacgttccatgtgccaggcaaaatatacaacagataatacaggacattttggactggcagcgaagtattatacacatttcacttctccgatccgccgttatccggatcttcagattcacagaattatcaaggagaatctgcgcggacgactgaatgagaatcgtatagaacattatgacaagatcctcccggaagtagcgaagcagtgtagtgacagagaacgactggcagaagagacagaacgtgaagttgtgaagatgaaaaaagcagagtatatgcgcatgcatattggagaagagtacgaaggtgtcatttccggtgttacaaaatggggaatctatgtagaacttccgaatacagtggaaggtcttgttcatgttgtggatctgcgggacgatcattataattttatagagcagacatatgaaatggttggagagcatacaggaaagacatataaacttggtgaaaaggtgcgtgtccgcgtaagtgatgcagataagctgctccgaacgattaatttcgagctggcataatacttgcaggagtgcggttaaaatagatgagttagaggttggaatcagatggcaaagacagagaaaaaacttattgcgaataataaaaaagcatatcatgattattttattcttgagaaatacgaagcaggacttgtgctgcatggcacagaagtaaagtctcttcgtatgggaaagtgtagtatcaaagaagcatttatccgtgtggaagacggggagatgtatatctatggtatgcatatcagtccttatgagaaggggaatatctttaacaaagatccgcttcgtgtgagaaagctgcttcttcataagaaggagatactgaaaatatttggtaagatgaaagaacagggaattacagttgttccgctgcaggtttatttcagcggaagtcttgtaaagattgagattggacttgccaaaggtaagaaattatatgacaagcgtgagacgatcgcaaagaaagatcagaagcgtgaagcacagagagaattcaaagcgttcaatcgataagggattgaagcaggagcgaatagaaaaagcaattggatcagaaaccaattgctttttttacttcattgatatcgccagtaaatacaagtccacccattccgacttcttttgctgcattgatgtttggctcaagatcatcaataaagaaacattcttctgcctttaaatcaaattttctgagaaaatgactgtagatttcaggagacggctttgcaagtctaatcggtccggaaaataagattccgtcaaactgagaaagaagttcacttccttcatagtattctgcaaaataggttggagcattagacagcagatagattggtatattgcgctcttttaattcatggataaatgtaatggtatccggaagtaaagtagtgcagcgtggccattcttttgcaaaccggcggatgcagtccttcaaatgttccggaacctgatcgatgacttcatttatgtaactatcataatcaagtgtgccggcgtcaagttctgcccagcgtttataaacgattttggataaataatccagttcttcttcatatggacagaattctgagaggatcgcttttccatcaaaacgtccgatgacatttccaaagtcaaaaacaatattcttgtatttcatgacaaattccctttctatagatgcttattttattatactgcgcagaaaagacagattcaaataaaatatgcattgctggtcgcacatcgtgtgaacagtaacatcgtgcgaacagtaactaatagacaaaaagaaaaaatctgtctaaaaattatcttgacatctattttatttatgatatactttgagagtcaaagtatttaaaggtcaaaacaattatggttcagatctggaaagaatcatactgtgaagagtgacaattattttgacagagttggagaagagatatgataggaagaatatgcgggacaggatcgtacataccgtcccatcgaatggacaacgtggaattgtcctctctggtcgacacaagtgatgaatggatccgggaacgcacaggaattcaaagccgacatctcgcaaaacaggagacggtatcttttatggctgcaaaagcagcagaagaagctcttgcagacagtgggctgaaagcagaagagattgacctgatccttgtagcgacgtcttcttcagaaacagtatttccgaatacttcctgtaaagtgcaaaaagcaatcggtgcagttcatgcatggggatacgatctgaatgcagcctgttcgggatttattcttgcgttgaatacggcgcagtcttatatccgttcgggtcttgttaagactgcactggtgatcggtgcagagaagatgagcagaattgtagactggaaagaccgaggaacttgcattttattcggagacggtgcaggtgcagtggttctccggggagaagaaagtgaaagtgtggaagccgtctatgcggccatggcacattcggcaggagacaaaggagaggcattgaccttacaatatggaacagaagaaacgccggtaattcggatggatggacaggcagtttttaagttcgctgtgagaaaagtaccggaaatcatcgaagaaatgttgaaaaaagcagatgtttcaagagaagatgtggattactttgttttgcatcaggcaaacagaagaatcattgaagcggctgcaaagagggttggcgtagaaattgagaagttcccaatgaatcttggtgaatatgcgaatacgtcggcggcgtcagttccaatccttttaaatgaaatgaatcgggatggaaagctgaaaagaggtcagaaaattatacttgccggattcggggcaggacttacatgggcaggatgcctgatggaatggtaaattcaagaaaggaaaacaaaatcatgttagaaaaagtaaaagaaatcgtagcagagtcattaaacgtagaggaaagcacattaagtgagacaacatctttcaaagaggatcttggagcagattccctggatctttttgagatggtaatggcatttgaggaagcttttgaagtagagatcccatctgaagatctggagcagatcacaacagtgggtgacgttgtaaaatatatcgaatcacacaagtaaaagtatagaactagtagaaaacgaagcatttcggttccttttcggcagccgatccgagagaaccgttgatagagaagtgatcaagaagggagttcttatgagaacgagaataacagaattacttggaattgagtacccgatcattcagggcggtatggcatgggttgcggaatatcatctggcggcagcagtttcaaatgccggtggacttggactgatcggaacagcaagtgcaccggccgagtgggtcagagaacagatccgtgaggcaaagaagctgacagataagccgtttggaatcaatattatgatgattagtccttatgcagatgaagttgcaaaggtggctgtcgaagaaggtgtcgcagttgtcacaacaggtgcaggatctccggaaaaatatgtaaagatgtggaaggaagctggaatcaaagtgatccctgtagttgcttctgtagcgatggcgaagagaatgcagcgttgtggagcagatgctctggtggcagaaggaacagaagcaggcggacacatcggtgagaatacaacgatggttctcgttccgcaggttgtagatgcagtcgaaatcccggtgatcgcagccggaggaattgcagatggaagaggaattgcagcggcatttatgctcggagcagagggtgtccagatcggaacacgttttgttgtgacagaagaagcacaggtgcatgagaattataaagaatgcattttgaaagcaagggatattgattctcgtgtgacaggaagatctacaggtcatccggttcgtgctcttcgtaataaaatgacgaaagagtatcttgagaaagaacaggcaggagcaacattcgaagaacttgaaaatctgacactaggaggactcaggagagctgttgttgatggagatgttcagagcggaagcgtgatggcagggcagattgcaggtatgatcaaggagaagcttacctgtcaggaagtgatccagaagctggtctcacagacagatgaactgatcggaggaaaaggattctatgagtaagattgcatttattttcccgggacagggagcacagaaagccggaatgggaaaagatttctatgaaaacagtaagacggcggcagaggtgatcgaccgtgcaagtgaactgcttggactggatatgaaagcactctgctttgaagaaaatgatcttctggatcagacagaatatacacaggcagcacttgtgactgtctgtatggcaatggagaaggtattaagagaacggggactcgccccggatgtcacagcaggcttaagcctgggtgaatattgtgcgattgcttcagcaggaggaatgagcacagaaaatgcaatcacaacagtaagaaaacgcggtattctgatgcagaatgcagtaccgggtggtcagggagccatggcagcggttctcggactggatgccggaaagattgaggaagtgctggcagatcgaagtggtgtaatgatcgccaactacaattgtccgggacagattgtgattacaggatggaaggaagatgtggaacaggcagcagatgcactgaaggaagccggagcaaagagagtccttccgcttaatgtcagtggaccgttccattcttcccttctggagcaggccggagaagaacttggaaaagaactggaacaggtagatttttctgatctccagatcccatatgtgacgaatgtgacagcagaatatgtaactgatattacaaagacaaaagaactgcttgcgcgtcaggtggcatcttccgtacgctggcagcagagtatggaacttctgatcgcggacggtgtagatacatttgtcgagatcgggcctggaagaacactggctggtttcttgagaaagataaaccgtgaggtgaaagtgtataacgtcggaacctgggaagacgtagataaggtggtaaatgaattatgttagacagactgacagggaaagttgcggtagtgacaggtgcttccagaggaatcggaagagcgatcgcgctgcgtctggcacaggagggcgcagcagtagtgatcaattataatggatcgaaagagcgcgcgcaggaagtgaaaacagagattgaatctgcaggcggaacagcacagatcatgcagtgtgatgtggcagatgcagcatcttgtgatgagatgtttcagacaatcattaaagaattcggaagaatagatatccttgtgaacaatgcgggaattacaagagacggactgcttatgaagatggcagaagaggattttgatgctgtgatcgatacgaatctgaaaggaacttttcattgtatccgtgcagtctcaagacagatgctgcgtcagagatccggaagaattattaacctgtcttctgtatcaggagttcttggaaatgcaggacaggctaattattccgcatcaaaggctggtgtggttggacttacaaagagtgcggcaagagaactggcttccagaggaattaccgtaaatgcgatcgctccgggatttattaacacagagatgacagaagtactttcagagaaggtgaaagaaggagcaacagcccagatccctcttggaaagtttggagagacagaagatattgcgaatgcggcggcatttcttgcttctgatgaagcacgttatatcacaggccagacgctgcatatcgacggcggaatggcgatgtaagaatagaaggagtaggaaaatgaagagacgagttgttgtaaccggaatgggtgcggtgacaccgattggaaatacagtagaagaattctggaacggaatcaaaacaggtaaagttggaattggtccgatcacaaaattcgatacaacagattataaggttaagctggcagcagaagtgaaagatttcgttggaaaagaacgaatggatttcaaggcagcaaagagaatggaattgttctcccagtatgcggttgcagcagcaaaggaagcatttgcggatgcgggacttgatatggagcaggaagatccttaccgtgtgggaacgatcatcggttcaggtatcggaagtctcagctgtgtagagcagaattacgacaagatccagacaaaaggaccagcgcgtgtaaatccattgatggttccgttgatgatctccaatatggcagcaggaaatgtatccatccagcttggactgaaaggaaaatgtacagatgtcgtgacagcatgtgcatcaggatctaacagtatcggagatgcactccgtgcgattcagtatggtgacttggatgtctgtgttgcagggggtacagagagctgtatctgtccgaccggaattgcaggatttactgcgttgacagcactgtctacaaatgaagatccaatgacagcttcccgtccgtttgatcaggacagggatggatttgtcctcggagaaggagccggaatcgtagttctggaagaacttgaacacgcgaaagcgagaggcgcgaagatttacgcagaactcgctggatacggctctacaggagatgcttatcatattacatctccggcagaaaatggagaaggagccggaatggcgatgaaacttgcaatgaaagaggctggtgtggcaccggaagaagtggattatatcaatgcccatggaacaagtacacatcacaatgacctctttgagacgcgtgcgatctgttatgcattaggagatgcagccgaaaatgtagttgtcaattcaacaaaatctatgatcggtcatcttcttggagcagcaggagcagtagaatttgttgtctgcgtaaagagtattctggataatttcatccatcagacagttggtacaaagaatgtagatccggaatgtggattgaattatgcagtaggcgcaccggtagagaaagaagtgaactgtgtaatttctaattctcttgggtttggtgggcacaatgtgtctcttcttgtaaaacgtttcgaagagtaaggagaagcgaagatgaagatggaagaaatattgaagctgattgaagcagtctctgcttctgagcttacagattttaaatatgaagaaaatggaacaaagctgaatctgaagaaagaacagcagaaggtggagattatacagagtccgggagtagttccggtgacaggaactgtcacagcgggtcttcagacagcagaaattctgcaaaatccaggaaatgaagcggatcacacacaggaagagcatcaggaagtgataaaagaaacagaaggtgaactaatcgtttcacctctggttggaactttctacgcagcaccggcagaggatgcaccgagttttgttaaggttggtgacaaggtcgaagccggacaggttgtcggaatcatagaagcgatgaaacttatgaatgagattgagagtgaatgtgccggtacagttgctgaagttcttgtagagaacggagagccggtagaatacggccagccgatttttagaattgtttaagaaaggaattcagatatgaatagtttaaatgtagaacagattcaggaaatcattccgcacagacatccatttcttttgattgataagattgaagattatgttccgggagaatatgcaattggatacaaaggtgtttcttatcatgaggatttctttcgtggacatttcccacagaaagcagtaatgccgggagttctgattcttgaggcacttgctcagacaggagctgtggcaatcttaagtgtaccggagaatcagggaaagattgcattcttcggtggtgtacaaaaatgtcgcttcaaaggaatggtatttccgggagatcagttgaaattagagacaaagattattaaaagaaaaggaccggtaggcgtaggagaagctgtggcaacagttaacggaaaggtcgttgttacagcagaacttacatttatggttggagaataaaaaaatcaggagcagaagaaatgatagagaagattttaattgcgaacagaggggagattgcagtccgggtgatccgcgcctgcagagaaatgggaatccgtacggttgctgtttactctgaggcagataaagatgcgctgcatacccagctcgcagatgaagcagtctgtataggtcctgctccatccgcagaaagttatctgaatatgcagaatatcatcagtgcaacacttgtgtccggcgcagatgcaatccatccgggattcggattcctttctgaaaacagcaaatttgcagaactgtgtgaacagtgcaagatcacatatatcggaccggattcaaaggtaatcagtgctcttggaaataaatccgttgcaagaaatacgatggtggaagcaggtgttccggttattccgggaagcaaggagcctgtctataccgtagaagaaggcgagaagatcgctggtgagattggttatccaatcatcgttaaggcagcacttggcggtggaggaaaaggaatgcgtgttgcacagacaccggacgagttccaggcaagtttccaaacagcacagaaagaagcgcagatggcattcggagacggaacaatgtatctggaacattttgtagaacatccgcgtcatatagaatttcagattcttgcagataagtatggaaatgtggtccatcttggagaaagggactgttccattcagagaaatcatcagaagatgatcgaggaatctccgtcagaagcactgacaccggaattgagacagaagatgggagaagcggctgtgaaagcggcgaaggcagctcattatacgaatgccggaacgattgaatttctcttagaaaagagtggagccttttactttatggaaatgaatacaagaatccaggtagaacatccggtaacagagtgggtgacaggaatcgatctgatcaaagagcagattaagattgcagacggacagagactaaaacttcagcagaaagacatcaagatcacaggtcacgcgatcgaatgtaggatcaatgcagagaacccgaaaaagaatttccgcccgtctcctggaaaaatcacagatgtacatttcccgggtggtgaaggcgtacgtgtagacagtgcgatttacacaggatatgaagttccgccttattatgattccatgcttgcaaaactgatcgtacatgctgacgacagagaagaggctatccgtaaaatgagaagcgcacttggcgaagttattattgaaggtgtggatacaaatattgattatcagtatgagattttgaatcataaaaaattcatatctggagatattgatgtggagtttatcggaggaatgatgaatgagactgcataatatgtttaaaaagaccggagagaagatcacttcgattcattcacgaaacagaagaaagccggaagcaccggaaggaatcttgaaaaaatgtaataaatgcggtgcggcaatcttgacagatgaagtaatcaacggaaaatatatttgtcctaaatgtcatggatactttcgtattccggcatataagagaattgagcttgtgacagacgcaggctcttttgaagaatgggatgcaaagatcgatgaaggggaaagaccggagaatccgttggatttccgggggtatacagaaaaagtcgaagctttaagagtaaagacaggacttgatgaagcggttgttacaggaaaagcaacaatctgtggatatccggttgtgatcggggtctgtgacggaagatttatgatggccagtatgggacatgcggtaggagaaaagattacccgtgcagtcgagcgtgcaacagaggagaggcttcctgttgttctttttacctgttccggaggcgcacgtatgcaggagggaatcatttccctgatgcagatggcaaagacttcagcagcactgaaacgccacagtgatgcaggccttctttatattccggtattgactgatccaactacgggaggtgtcacagcaagctttgctatgcttggagatatcattcttgcagaaccgggagcactgatcggattcgccggtccgcgtgtgatcgagcagacgatcggacagaaattgccggaaggattccagagagctgaattccttcttgagcatggatttgttgatcagatcgtaaccagggatgagatgaaggaagtactggggcagattctgaaaatgcatacgtttacagatgaaaagaaagaagaatgtccggaaaagaaaaaagagaacagaaaaaacatatctgcagtaaaagaaaatgtgtcagcctgggagcgtgttctgaaatccagggaaaaagaacacccggtcggtaaggattatattgacagattgtttacagattttgtagaattacatggagacagatattataaggatgatccggcagtagtaggaggaattgcgtattttcatggaaaagcagttactgtgatcgcccagtgcaaaggaaagacaacgaaagagaatctggaacggaattttgcaatgccgtctccggaaggttacagaaaagcactgcgtctgatgaaacaggcagagaagttccagcgtccggtcatctgttttgtagatactccgggggctttctgcggaatggaggcagaagagcgtggacagggtgaggcaattgcccggaatctgtatgagatgtcagctttgaaagtgccggttctttcaattgtaatcggagaaggtggaagcggcggtgcgcttgcacttgcagttgcagatgaagtgtggatgatggagaatgcagtgtattcagtactttcaccggaagggtttgcaagcattttgtggaaagacagcaagagagcgtcagaggcggcaggagtgatgcgtctgacagcagcagatcttaaggaacttaaggtgatcgaagaaataatttgcgagcctgaagtgtaccgggaagatacgatggttcctgtgctctgtgaactggaagagaagatggaacatttccttgaacaatatggaagcctttcagaaaaacaactgacagatagaagatacgacagatttcgtcgaatgtaagagatagaaaacatggtattgtctgaattaagatagcagaccagaatgaaagtgatcccggaagattcaatagagaagagctgtttgaagagatcagagaacagtagaagacgaggaggaaaaaagatggatgcgtataataccatcaatgacattctggtacatttatttaatgaaatctgggagctggagaaaaaggcaatcattacagaggagtttaaagacatcacaaacaacgatatgcatataatagaagcaatcggtgtttcaggaaagacaacgatgtctgtagtggcaaagaagatgaagattacggcagggtctctgaccacagcggtgaatgggctggtaaacaagaagtatgtaatgcgtgcccgcggtgaagaggatcgaagagtggtgtatatctggctgacagaaaaaggggagaaggcttactatcatcacgaggagtttcacagggagatgacaaatgctgtgctgaacagactggatgaaaaagagattccggttcttatgaagacattggacggactttcagaatttttcaggggatattcttcagaggaataaaatgataattatcaaggaaaatttgacgttttgtcaaaaatgagttacaataatctgtatcgtgaataatttatcattacggacaaaagttcttgttattatttcgcgttaagaataacattgtaatgaggtagtgccaatatacttgggtgtatattttaggagggaaacaagtatggtaacaaagaagacatcttcaacaacaaaagctgaaacagcaacagtaaaggcagagaagaaagagacagcagctgcgaaagcaatcgagacaaagaaagacacaacaaagaaacttgaaacaaaggcagcagtgctggtagatacaccagaagttcaggcagaagaagtgaaagagacagtgaagaaggcagctaagaaggttgcagcaaaagcagaagatacagctgaaaaggctgtaaagactgtaaagaaagcagcagctaagaagacagcaactaagactacaaagaaagctgatctgaagacagaattcttccttcagttctctggtaaagagtatacagagaaagagattcttaagaaagtcaaagatgtatggacaaaggatttgaagaataaagtcggagacatgaaagatgttaagatttatctgaaaccggaagagtcagcagcatattatgttgttaatggagatacaacaggaaaaatcgatctgtaagatataaataaaagatataagatcgctttccggacgtaccgggaacaggtttacttaagaaaagacagggagtcagacacagctgaatgcaggtgaaggacggacctgtctttttaatatattaggaaagtccttgtaaacatttcgccggtgcagaaggcagtgtgccttaaggtgacaggaatctggcaagtgtggtttgagaaaggagtatgcaagatgtacgagaaagagattgagcagctgcaggcaatgattgatgagagtaaccggatcgtgtttttcggaggagccggtgtatcaacagaaagtaatattccggattttcgaagtgcaacaggaatttatcatcagaaatataagtattcaccggaacaggtggtcagtcatagcttttttatgaaatatccggaagcattctatgagttttataaagagaagatgatgattttggatgcgaagccaaatgctgcccatctgaaactggcagaattggagcaggccggaaaattgcaggctgttgtgacacagaatattgatggactgcatcaggcggcaggaagcagaaaagtctatgaacttcatggaagcatccacagaaattactgtatgaaatgtgggaagttctatgatgcggaatatgtgaagaattcagaaggaattccgagatgcagctgcggcgggatgattaagccggacgtagtactttatgaagagggacttgaccagaagacgatccaaggggcagtcgaagcaatttcatcagccgacatgctgatcatcggaggtacttcccttgttgtttatccggcagccggttttattgattattttcacggaaaacaccttgttgtgattaataaatcagaaacagccagaactgtccgggcagagcttgtaatatcggctccgatcggagaggttcttggtgcgattcatgtaagtggcgaataaaatttcttttcctgtaaatacttctgaaaaggaggatgctgtatgcagcaataagaagtatgggaagaaaaaaggaaaagacaatcaatcttacagaacttgaaccggaagaaaaactgaagtatgagatagcagaagaattaggccttttagatcgcgtgatgcaggatgggtggaagtcattaacatcaaaagagacaggacgaattggcggaatggtcaccggaagaagacgagagataaaaaaacagacaaaaattgcggataaaaatgatgaaagataaacaaaagtaaaattttgaatgacacagcttttgacaaatcaggataaatttggtaaaatagacagaatggggagaaattattttgcgttagaattcgcagagttttttggaaagtgataactttggtggcataaatgacagaaaaaatttcaatatttgatgtggagatttcctgtattaaggcaaaagaagcgatgatgcaggcaatcgaattcatgaaaggtgattccgtcaataccattgagcttgtatcgatggaatcgctgatgaaagaacatgagaatccggagtggaaaaaaaaggtttccatgcaggatcttgtccttccgggaagtgtagagattcttgaggcagcaaaagctgatgatgcaagattgttgcgtgagacggataataaattattcttaagaatgtttttgaaatatttacagaagaaccatcataagatctatcttctggcagccagtcaggaggaactggtaaaagcagaggaagctcttgcaaggtataatcagggaatccgtgtggtaggagatgccgtgatccatctggaagacggagagttgacagatgcagacaggatccatggaatagtgaatgcagtcaatggctcagaggcagattgtattttatcagtccttccatcgccggcgcaggaagattttattgaacagaacctggcattgatcgacacaagagtctggattggctgtggatcagttctgatgcgcagctttgacgacagaaagatgacaagccggataaagagaatgttagtaaagaaagtatttcgctataaagtagagaagcagaattagcctttgtgaagaatgctaaaagataaaaatgtgaatatttcatagattcgacgaagaaatgcataaaaaagatggatttcctctttctttttttgctgttttgccttaatataatataagggtatgtgtacggataaataatgcatacaaaaaaattgtggaatatgcacatgcgtgttactacttacagtttgctgtaatcagcaatacatcgtacagagtggaggaaaaaaggatgatttcaaatcagatacttcaaaacactattgaaggattaaagggaatatcaagggttgatttctgtgtactcgacacagaaggcaaggaacttgcagcaacatttgatatggcaaaagattgtggggaagcggttctttcttttgttgaatccccggcagacagccaggtgatccagggatgccagttctttaagatctttgacgaacagcgtttggaatatgttttgcttgcagatggcgagacagaagatgtgtatatgctcggtaagattgcggcatttcagatccagagtctgcttgtagcttataaggagcgttttgacaaagataactttatcaaaaatcttcttttagacaaccttcttttggttgatatttacaatcgtgcaaagaaattacatattgacacagaagtaaaacgtgttatctttattattgaaacatcgcacgagaaagacagtgctgcacttgataatgtgagaaatcttctgggaggaaagtcaagagactttatcacagctgttgatgagaagaatattattgttgtgaaagaactctcagataaggacggcaataaggaacttgagaagatggcgaaagagatgctggatacgctccaggcagagggaagcgacgagcagattcatattgcatacggaaccatcgtaagtgatatcaaggaagtatccaagtcatacaaagaggcgaagcttgcacttgatgtaggtaagattttctttgatgagaaggatatcgttgcttatacaacacttggaatcggtcgtctgatttatcagctgccgctgccactttgtaagatgtttatcagagagattttcgaagcaaaatctccggatgactttgatgaagagacattgacaacgatcaataagttctttgagaacagccttaatgtatcagagacatccagacagctctatatccacagaaatacactggtatacagactggataagcttcagaagagtaccggtctggatctgcgtgtgtttgaggatgccattactttcaagattgccttaatggtagtaaagtatatgaagtatatggagacattagagtactagaaccgtaggagtatagataagttttaggaggaacatatgattgaattaaggaatgtgacgaaggagtattccaaaggtcacgcagccttgaatggtgtttccgtgaagattgaacgcggagagttcgtattcatcgttggtgacagtggatcaggtaagtctacattgatcaaattgatcatgaaagagttgaatccgaccgagggtacaattatcgtcaacggccagaatttgaaccgtatgaaacacagaaacattgctaaatacagaagaggacttggagttgtgttccaggatttccgtcttctgaaggatcgtaatatttatgagaatattgcattcgctttgcgtgtgactgagacaccgacccgtgtgatcaagaagaaggtaccggcagctctgtcactggtaggacttgcacagaagtataagtcattcccaaaggaactctcaggtggagagcagcagcgagtagcgattgcaagagcaattgtaaatgaacctgccattctgctggcggacgagccgacaggaaaccttgacccgacaaactcatgggagatcatgagtctgttaaaagaggcgaatgagcgtggaacaacagtacttgttgttacacataaccaggagatcgtaaacgagatgaacgaacgcgtcattactatgaagcagggcgtaatcgtcagtgatgagaaaaaaggtgggtatataaatgaggattagtacatttggatacgttggaaaacagggcgttaagaatatctggagaaacaagatgttttcactcgcatccatagcgacgatgtcagcatgtattttcctgtttggattgtttttctcgatacttgttaacttccagtatattatcaaaagtgcagaagaaggtgttgcgatcaccgtcttctttaatgatgacgcaacagaggaacagaagaaagagattggcgaacagcttgagtcccgtgatgatgtttcagaagtgaagtatgtgtcatcagatgatgcatgggcagaattccagaaagagtattttggagacaacccggaacttgcagaaggttttaaggatgataacccgctggcaggttcggataactatgaagtctacatgaagacggtaaaaggtgataataaggatctgatcgcgaagagtaagtctctttcagctacgcagcaggatctggttaaatttgcacagagtctggacggagtcagacaggtcaataagtcagatgttgtagcgaacacactttccagtgtgaatatgcttgttgcatatgtttcaattgcaattatcgcaattcttctcggagtatcgatcttcctgatcagtaatacggtaacaacaggtattacagtcagaaaagaagagattgcaatcatgaaatatatcggagcgaaggactttgtagtaagatcaccattcgtgatcgaaggtctgatcatcggattattcggtgcagttattccgcttgctctgttatatttcctttatgacaaggctgtagtatatattatggagaagtttagcattctgaagaatatcattacattccttccggttggaaatgtatatatctatttgttgccaatcgggcttgcaatgggaattggaattggattcctcggaagttacttcactgttcgtaagcacttaagagtgtaataggagatacctatgaaaagacggatgagaaaggtgacagcactggttctgtcagtcggaatgatgctgtcaatgacaattacttccggtgctgtgacaattgatgaagcgcagaaaaaagcagatgagctgcaatcacagaagagtgcagctcaggctgaaaaagatacacttgctgcgaaacttaattccatcattgaccagatgaacaagacgcaggaagaattaagtgccaaggaaactgaaatttcaacagctgaggaagagcttgtacaggcgaaggttgatgaggatgatcagtataacagcatgaagaagagaatcaaattcatgtatgagggtggtaatacccagttccttgagatactgatgtccagcagcaatattggtgatctgctcaataaagcggagtatgtatcaaagctttcttcctatgacagagatatgcttgttgcttttcaggaaacggtgaaagctgtagaagaaaaggaagcaaagcttaaagatgagtatgagaagctgaatacattacagacaagcttggtaagtcagcagacggaagcacagaatctgatcagcagtaaggaagcacagattgcggagattcagaatcagattacagataatgcgaacattcttgcagacctcaaggcgaaagcagaagcagcaaaacgtcttcaggaagagcaggcagcggcggcggctgctgctgcggcaaagaagaacaatagcggaagcagtagtaacggaagcagtagttccagaccggcttccagcggaaacgtggtgagcggaagtggatattttacacatccatgtccgggaatgacgtaccagtccagttattttggagaggttcgatctttcgattcaagaccacataaaggaaatgattatgccgcaccgacaggaacacctacatatgcagcagcagccggaacagtcattacggcaggctggagcaacagtgcgggaaactgggttgttataagccatggaaatggattggtgacaaagtatatgcatcacagctcaatttgtgtgagtgccggtcagagagtagcaaaaggacaacagattggatatgttggttctacaggatattcaaccggagcacatctacatttccaggtggagcttaacggaacaccagtgaatccgaataattatatgtaagacaaagggattcaaaatcttcctttcatgtttacatgaaagtgattcaaagaataaagggggacaaagtggaagattctgctttgtccttttctttaaataacagcgaaagggacagacaatggaacagaaaaagaaaaagggatatggagccgggattgttaccggaattcttgcaacagttcttgtcagcctgcttctccttgggggattcagggtcattacgaacacagccggcagttatgtatccggtaaagtgacagaaaaagaggtatcaaaaaaactgaataagctgaatgctttgattgataaatattatctgtatgaagatgaaattgatacagataagctggcagaaggaatttattccggatatacgagtgcactgggagataagtacactgtttattatgatgaagatgagacaaaagctctgagggaatcaacaagcggaacattttcaggtgtgggtgcaacgctgacaaaagatgcggatacgggctatgcgacaattgtaaatgtctatgaaggctctccggcagagaaagcaggactgaaagcaggagatatcctggagaaaatcgatgaccacgaggttggtgatgagcagcttgatacggtggtgtcctggatcaaaggggaaaagggaacagatgtaaagattacagttctcagagacggagaagaactggaactgactgccacacgagatacgatcgaagtgaagacagtttcgtatgagatgaaggagaaccagattggctatatcagagtgtctgagtttgacacaataacttatgaccagtttaaagaagcgttggacgatcttgaaaagcagggaatgcagggtcttattgtcgacctgagaaacaacccgggcggaagtcttgatacagttacaaatatgctgcgtctgcttcttccggaaggtacaattgtatcaacaaaggacaagaatggaaagacagacgaaatcacttgtgacggaactcatgaatttaagaaaccaatggcagttcttgtaaaccagtacagtgccagcgcatctgaaatcttcagcggtgcagtacaggattatggaacagcgaagattgtcggagtgacaacgtatggaaaaggtgttgtgcagcaattgatggatctgggagatggaacctgtctgaaagtgacgattgcagagtattatactccaaatggaagaagcatcaatggaaaaggtgttgaaccggatgtgaaagttgaataccagtatgatgaggagaatccaaaagcagataaccagctggatcaggcattaagcacagtacaggaagaaattagtgaaagtacacaaaaccgataggttgaaaatatcttgttttgatgaaaagttaaaatgtgtgacaatttgaataaaacctcttgaaaatcaaaaaactctgtgctaatattgaaaacaagttttagtagactaaagtgctgaactagaaaaaggcaaagaacaagactctgattcacagaaactgacaggaagttggcgtcaccgactgagagcgccggacagcggagcgaatcaagggaacacttgggagctggctgtctgaacaggtgaagtagggcagcacgtggagcatacgttacatgcaaagaggggaatctggcttacacagggatagagataagatttgaaatgtgaagactgagattcaatgcgggtggtaccgcggatattatgattgtaatttccgtcccgggatactgatgtatcccggggcttttttatttagaaagcttcttcccgggatgctggaatctgaaaggagaagaattatggaatttgtaacaggtgtaaaaaagaaggaaacattggaactgagtgaacttctcgaagagggaagaattggaaccgaagtgaaagtaaatggtgcgatccatacgatccgtgatatgggaacaattgcattcattattctcagaaaaagagaaggacttgttcagtgtgtatatgaagaaaatatttccaaatttgacttgaaagatgtgaaggaagcagatacagtagaggtaacaggtgtgcttgcagagtctgcgaaagctccgaatgggattgagattcgccttggtgaattgaagatcttaagtgagccggcagagccaatgccgcttccgattgcaaagtggaagctgaacacatctctggaagcaaaattaaactacagaccgatttctctgagaaatatcagagagcgtgcgaagttcagaattcaggaaggaatcgtaagagggttccgtgatttcctttataaagaaggatttacagagatccatactccgaaaatcggtgccaagagtgcagagggcggtgcgaaccttttccgtctggagtatttccacagaccggcgatccttcagcaaagcccacagttctataagcagatgatggtcggagtattcgacagagtctttgagacagcgccagtattccgtgcagagaaacacaacacaaagcgtcatctgaatgagtacacaagccttgatttcgagatgggatatattgatggatttgaagatatcatggcaatggaaacgggatttcttcagtatacgatggagctgttgaagaaagagtatgcaagagaacttcagattctgaacattgaagtaccgaagacagataatattccggcagtaagattcgacgagatcaaacgactggtatccgagaagtatgacagaaagatcaagaacccatttgacctggaaccagaggaagagacattgatcagccgttatgcgaaggaagaatgggatgcagattttgtattcgttactcattatccatcaaagaaacgtccattctatgcaatggatgatccggaggatccgacttacacgctcagttttgacctgcttttcagaggaatggagatcacaaccggcggacagcgtattcatgattatcatgaacttcttgcgaagatggagaagcgaggtatgacagatgaaggcatggagcagtatttaagtgcattcaagcatggaatgccaccacacggaggtcttggaataggtatggaacgtctgacaatgaagatgatgaacgaagacaatgtaagagaaacaacattattcccaagagacttaagtcgtctggaaccataagaagaaaatacaaaaacgggtcaatcctctggattgaacgaaaaaactgttggatgtgaaggtctgaactgagaaagagaactgcccacaggatgttgtggtcagaaacttaaggagtagaaacgagggaggatctttatgtttaagaaaaaagaatgttatctttgcggaggtaaattaattaatggccgttgcagttcctgcgggctggataacacaaagctagacaaaaagaattacaggctgaatgagagcagttttgaccgcaagaaaaaaatgacatattcccagaaacgacagaatgacactggagagacaaaaaaccgggagaaaaagaaggatgcgggacatctctgtgagagtcataacggacggaaaagaacgcagacagaatatcagcaaaaagaaaatccgaggatggaaatcccacagacagggcagatgcagccaggtgggccgacggtatttaatccggcaaggaaggctcatacaggatcttatgaggaacaaaaaaaagcaaggaaaatcagtggaattcttgcgggaattatcgtggcaatcgtatcatttacaagcattgcaggttccgttggtgatttcatttcctcatttggggatgatttccattcctcagattatgactggaatgatgatggcagcgaagtggagtctgagtatgatccatatatgaatacaacgagagaactttctgaaacaggagcaacttatgactgtgtattaggatatggggagtatgaaatcggagcacagatcccggaagggacttatgaagtggagcttgtctcaggagaaggctccatgcagcaggatgatcctgagaattcgatttattactattcttattttagtgaagatgagtcagatacggatgcaggagattatctggacgatgtgagattgtatacaggaggtcatctgaagattaatacaggactggttgtccagtttcattctgagaatgcacagacggaacagatgcagctggaagaaaatccgctgacggaacaggtaacattgaaagctggaaacacttatacggcgggaacagatttcccggcaggatggtatgatgtgaccgaggcatcaggagttgactgggcggagcttcattacaagatttatcttggtgatttttatgataaggaaaatgaaaatctcaattatgaaaattatggactctggttttatgatacagatggatcagaatcttatagaaatgcagttttcccggagggaacggagctggaagtggatgatggggacttaatcctgacgccgtccggctcagtaaaaaaccagaattatgacagtttctatgatatgtaccgctacaggtcgcaataagctgagaaatttatgatactgattttgggaattgtcaggattagcaaagacagagtagaaagaaaggatgattaaattggcaaataaaatatccgatgaaacaatcgagtatgtaggaatccttgcaaagctggaactttcagaggaagagaaagaagcagcgaaaaaagacatggagcagatgctggattatatagatacattaaatgaacttgatacaacagggattgaaccaatgtctcatgtatttccggtacagaatgtgttccgtgaagatgtggtgacaaatggcgataacaaagaggcaacacttgcgaatgcaccacttcgtaaagaggacagttttgaagtgccgaagacaattggttaagggagtgagagcagatggatttattaaaacttacagcccttgaactgggcgagaagatcaaagtaaaagaagtaactgtacgagaagcagtcgatgcagtgattggacagatcaaagaagcggagtcagagattcatagctttgtgacgatagatgaagaaggtgcttatgcacaagcggaggaaattcagaagaaaatagatgtgggcgaactgacaggtccacttgcaggagttccggttgcagtaaaagataatatgtgtatcgagggacagcttaccacatgtagttcaaagattctttccaacttcaaaccgacctatacggcagaggcagttgagaacctcagaaaagcaggagcggttatcattggtaagacaaatatggatgaatttgccatgggaagtacaacagagacgtcttattacggaccgacacgcaatccgcacaacacagcgcatgttccgggaggttcttccggtggttcctgtgcggcagtggcagcatccgaatgttattatgcacttggatctgataccggcggatccattcgtcagccgagttctttctgtggagttgtcggactaaaaccaacttatggaaccgtttcccgatatggacttatcgcatatggatcttctttagatcagattggaccggtagcgaaagatgtatcggattgtgcggcaattcttgaaacaattgcatcccatgatccgaaggacagcacttccatggatcgtgatgattgtgatttcacagaagcacttgtcgatgatgtgaaaggactccgtattggaatcccaagagactatatgggagaaggtctggatcctgaagtaaatgatgctgtgatgaaggcagcaaaagtactcgaagaaaagggtgcgattgttgaggcgtttgatctgcgacttgtaaaatatgcaatccctgcttattatacgatcgcagatgcagaggcaagttctaacctggaacgttttgatggtgtgaaatatggttatcgtacgaaagattacgatggacttcataacatgtacaagaaaacacgttcagaaggatttggtcctgaagtaaagagaagaatcatgcttggatcttttgtcttaagttcaggatattatgatgcttactatctgaaggcacttagaacaaaagctttaatcaagaaagagtttgaccgtgcattccgtaattatgacatcattctcggaccggcagcaccgacaactgctccggagcttggaaagagcttaagtgatccgatgaagatgtatttgggagatatttatacaatctcagtcaatcttgcaggtcttccgggaatgagcgttccggttggaaaagacagcaaaggacttccaatcggtatgcagctgattggaaatgtatttgaagaaaaaactttgatccgtgcagcatatacctatgagtgtgcgacaaagaagatgcatgaaacaccggcaaatgtcggtcttatgtcagaaaaggaggtgcgttaacaatggcaaagcagtatgaaacagtcattggactggaagtgcatattgagctggctacaaagacaaagatcttctgtggatgcagcacagaattcggtggcgcaccgaatacacatacttgtccggtatgtactggtatgccgggatcgcttccggtgttgaataaacaagttgtagaatatgctatggcaattggtcttgcaacaaactgtaagattacacaggtatgcaaatttgaccgtaaaaactatttctacccggataacccgcagaattatcagatttcccagctgtatctcccgattgccagagatggatatgtagagatcgagagtggttcaggaaagaagaaagtaagaatccacgagatgcatatggaagaagatgcaggtaagctggttcatgatgagtgggatgatacttcacttgtcgattataaccgaagcggtgtgccacttgtagagatcgtatctgaaccggatatgcgttccgcagaagaagttatttcctatcttgagaagcttcgtatgatcgtgcagtatttaggcgcatcagattgtaagcttcaggaaggttctatgcgtgctgatgtcaacctgtctgtccgtgaagtcggatccgatcagtttggtacaagaacagagatgaagaacctgaactcatttaaggcaatcgcacatgcaattgaaggcgaacgtcagagacagattgagttgatcgaagaaggaaaacaggttgtacaggagacaagacgctgggatgacaacaaagagcattcttatgcaatgcgttccaaagaggatgcacaggattatcgttatttcccggaaccagaccttgttccgatcgtgatcagtgatgaatggatcgagaaaatcaaatctcagcagccggaacttcgtacggagaagctggagcgttacaaggaacagtttgatattccgcagtatgacgcagagatcatcacaggttctaagaaaatggccgatctttttgaggcaacaacagcaatctgtgagaaaccgaagaaagttgcaaactggctgatcggagagaccttccgtctgatgaaagacaatggaatggagccggaagatttaacattctctccggagaacctggcaaaattaattgatcttgcggaggcaggaaccattaacagttctgtggcaaaagatgtattcaagcagattttccatgaggatatagatcctgagaaatatgtcgaagaacacgggcttaagatggtgaacgatgaaggtgcactccgtgagacagctgctaaagtgatcgcagacaacccacaggcagtcgcagacttcaaaggcggtaaagagaaagcaatcggagcactgcttggacagacaatgcgcgccatgaaagggaaagcaaatcctggaatggtaaatcaggtgctgcgagagttgttgaaataaaaattgatttgtctgttaagattcctgtaaatggaacagatacatttattgacctaatattgaaattaagattgatatattgacagtctgaaaaatgtctgctatattacaagtagaacacagagaaataataaactatatatgttcaaaacaataagagattcggaaggatgtggaaagaatgaaacgagattattatgaagtgcttgggctgtcaaagggcgcagaggataaagaaataaagagagcatatcgtaagctggcgaagaagtatcatccggacacgaatcctggggataaagaagcggagaagaaattcaaagaagtgacggaggcgtactctgtactgagtgatccggagaagaagaaactgtatgaccagttcggtcatgctgcatttgatcagagcggtgctgcaggttccggatacggaaatgccggtacaggtggctttggaggattcggcggaaacggcggattcaaaggcggtacttaccgtagttatggtggaccgggaagtggatatcaggagtatcatttcgaaggtggcgacatggatgatatgtttgatgacattttcggaaatatgttccatggaggaagtgcttcaggtcgcagcagaaggacatcaggatttaccggaggatttggaggtgaaagctttagatcaaaaggttctgatatcaaggcaggtatcactgtaggatttgatgaggctgcatttggtggagataaggttattacactgagtaatccggaaaatccgggacaaccgggacagtcactgaaggttcatattccggcaggtattgataacggaaagtcaatccgtttaagaggaaagggaatgccgggaaccggtggtggtgaagccggagatcttctgttgaaagtaacagttgctccgaaacctggatatgagcggaaaggtatggatgtatatacaaccgtatctgttccgtatacaacagctgtgttcggaggtgaggcattggtccatacactgtatggagatgttatgtgtaagattaaagagggaacacaatcgggttccaagattcgtctgagaggtaagggaattgtttcgatgaaagattcatccgttcacggagaccagtatgtgacgattcagattgaagtgccaagaaacttaagtttgcaggcaagacagaaattaaaagagtttgaagaaatctgtcaggggagttcaagaacagcataaataaatgaaaagaccagaggcttgttttacaaattgaaacaagaacctctggtcttttctgctgtttagaatattgctgtagctgtttagaagttactgtgagcagtaacgttttgcacaggtacaatttatagccactgactcagaaatttgaagccagtaacaaacgaattataattgggattctgctagtcacgttcccaacgaccggaagcaccacatggaagaaccaatcctgaatctgtaacaggaagtccgatctcctgagaatctacatgtccgttccaaggttttaattcagttgagatcatgtaggtaagtacggcaggagcaagtcctgttgtataagaattcacaaggaagaacagtgcatccttggaaagaatctttgtacaaagcttgatgagtggatggatcatatcttcaatcttccagatctcgccttttggtccacgcccatatgacggcggatccataatgattgcatcataagtgttgccacggcggatctcgcgttcaacgaacttcacacagtcatcgacaagccagcggatcggtgcatctcccagaccggaagaaaccgcattctcctttgcccatgtcaccatacccttagatgcatctacatgagtaacctgcgctccggcagctgccgctgcaagtgtagcacctccggtataagcaaaaaggttcagcaccttgaccggacgtccagcattcttaatcttctcagagaaccagtcccagttagttgcctgctctgggaagagtcctgtgtgcttgaaactaaatggttttaaattaaatgtgagagaaccgtaatggatctgccactgctgtgggagactaaaaaactcccattcaccgccaccctttttgctacggtgataatgtccgttcatctctttccaaccgcggttcttcttaggagtatcccagatgacctgcgggtccggacggacaagaagataatttccccaacgctcaagcttttcgccacctgagcagtcaagaatttcgtaatctttccaactatctgcaatccacatgaattagttaatcctttctacaaaaaatacttgtaatcatacagagacaatctcaaaaaacgatacatttttgaaattgtttcgttttatatcgtctataacatttctattataatagaaagtcctatggtaatgcaatgaaaattttcagattcagagatcaggtattgtcaaccggtattattcacactctgtgtgacctgcattcttataatacgactggttaaaatgcactaataacccactaaacagataggaatatgaaaacaaaacgccgaaaacatataaaacctattgacgtagtaggttaataaggtgtatcatacgcctatcgaatctgagatgcgaaaaagtaacaacgttacatcaaatgatagatggagtgatgagtatgataaaagtagaacatgcaaacaaaacattttccgggaaatacggtacagtacatgcgctgcaggatgtcagcattcatgtagagaaaggtgacatctacggaattatcggattttccggagcaggtaaatcaactttgatccggttagtaaatggattagagacaccggatacgggaaatgttatagtccagggagaaaatcttgggaatctgaaaaaaacgcagcttcgcaagcttagaagaaaaatcggaatggtttttcagcaatttaatcttcttgaatcaaaaacagtgtatcacaacattgcattgccattgattcttgaaaaggcaccaaaggaagagattgataagaaagtaaaagaagtactccggtttgtagaactggaagataagaaagatgtttatgtaagccagctttcgggaggacagaaacagagagtgggaatcgcaagggcactgacaacaacaccggacattctgctctgtgacgaggcaacaagtgcactggatccgcaaactacagaatccattctgaaactgcttaagaagattaaccgggagatgggagttacaatccttctgatcacacatcagatgcaggtcgttcagatgatctgtaataaagtagcagttatggagaacggacaagtagtagaggccggaagtgtgcttgatgtattcggaaagccacaggcacctgttacaagaagattcgttcagactgtagtaaatgatcagattccggaaagcattctaagtcttgtgaaagaacagaaagaacatttccgggtagagaggcttaagtttatcggaagcagtgtaaaacgacctgtgatttcagatatctgtcatgtggatggaattgtagtaaatattctgggagcaaccgtgcaggaattgcaggagaatgtaatgtgtgtgttcattttgcagctgatcggaacggaagagaaaatattagaagctgagaaacagattgatgagaatggagtaatcagagaaagagtggaggcgatttaatggaacaagagtattttggagtatcactggaaaagttactgaccagtggtggacagacattatatatggttgcatggtcactgattattggaacaatcataggaattattttggcattgatccttgtactttgccgtaaaggaggactgatagagaatctgatcctttacaatattgtaagtatctatattaatatagtaagaagtattccatttgtgatcttactggtagcaatcatgccgttgacaagggcaattgttggaacgaccatcgggagtacagcatcacttgtcccgcttgttatttatatcagtccatatcttgcacgcttgatggaaaatagcttactggagattaatccgggtattctggaagcggctgaagcaatgggggcatctacctggcagacgattcggtattttctgcttccggaaacacttggatctatcgtactcgcattgacaacaggtacgatcgggttgcttggagcatcagcaatggctggatatgtaggcggaggaggtgtcggagacctggcactgacttatggatatcagaggatgaatacaccattgatgatctttactgtagttgtactggttgtatttgtacagatccttcagcttgcaggaaatacaatttcaagaaaactcagacaacatagataattgattaagaaagaacgaggagaattatattatgaaaatcaagaaaattattgcaggattattagtagcgacaacagcattcagcctggcagcatgcggaaattcaggttcaggagatacgaagaaaagtgacgcggatacatcagagaaaaaggaaatcgtctatggaaaatcccagggaccatatacagaacttttcgaagatgcaattgttccaattcttgaaaaagaaggatatactctgaaagctgttgacctctcagatcttcagacagcagatgttgcattgaatgatggagatgtagatgtcaatgtagaacagcatacagcatacatggacagtttcaatcagagttataacgcagatctggttgcaatcagtccgattccaactgttccggcaggagtttattcagaaaaatacgattctgtagatgaaatcccggatggtgcgaaggttgcagttccaaatgatgcgtccaacacagcacgctgctatctgatgcttcagaaaatcggctggatcaagcttgacgagaatgctgatccatccacagttacacaggatgatattgtagagaacccacataatattgaatttacagaaatgaacagcatgacaattccggcagcagaatctgattttgattatattgcaatcacaggaagtgttgtatataatgcaggcattgatgcttctacagcactggccaatgaagatatttcagattatcttgtacttcaggttgttgtaaaagaagagaacaaagatgcagattgggcacaggcaatcgtggacgcataccattcagatgaattcaaacagtatatgaaagaaaacaatgatggattatggtggatcccggaggagcttcaataattaagaaaggcagtgagaaaaatggatcagacagaaaaattaatcctggaagcaatcgatcagcacagagatgagatcattgaatttgccagagatatatacgatcatggagaacttggctataaagaattcaatacagcagaaaaattcataaagaagatgaaagaattaggtctgcgcacagagacaggacttgcaattacaggaacaaaagcgtatttaaatgaagaaaagaaagatacagcaagccttgcacttcttggagaacttgatgcacttaggattccggagcatgcgcatgcgaatcctgagacagatgcggcacattgctgcggacatcatgcacagatggctggaatctttggtgcggcactggctcttacagttccggagatcgcggaaaaactggatggacaggtggtattttttgcaacaccggcggaagagtatggtgaaattggattcaaaaatgagctgcgtgcacagggaaaaataaaatatggcggtggaaaatgtgagctgcttcgtatcggcgcatttgatgatattgatctttgtattacacatcacattgcaccgggggatgacatcatagtaggaagtggaaccggaaatggatttgtatctaaagtgatccgttgtttaggtaaggcagcccatgcggcaggaacaccggaacaaggtgtaaatgctctgtcggcggcgtcacttggtctgcatgcactcggtctgaatcgagagacattccgtgatgaggattgtgtccgtgtccatccgatcattacaaagggtggcaacctggtaaatgtagtgcctgatgaagttgtagtagagacattggtaagagctaaaacaatcgaggcatttacagatgcagcgaagaaaacagaccgatcctttcacgcaggggctactgcaatgggagcgaaggttgaaatcacaacacttccaggatatcttccgacacttgcggaagaagcactcccagaattaaaaagagcagcagaactttctgcaccggaaacaaatgtgatcgaggcatcaggacatacgggcggatctacagatgtcggtgatgtccagcacttaatgcctgtatatacatttaatacaggtggtgtaaagggtggactccatcaggtagaatttgaagtgacggatgaggaagaagcttatattgtcactgcgaagatgtttgcacttggagcctatggacttttgaaagaaaaagcagcaagaagcagagagcttgttaaaaattataagccggtatttgaaaattcagcaaaatatgcggagtttatggatcagtttgattcgaaagaagtattggaataattctatacatttccccacttttatggtataatttaaaagttattttaatgatttatcgatttaatgtgatgaacagtcgacgtaataatatcataaaagaaaggaattagagaagtatgttatctacgatagaatcagtaaatagtgctgtgaataactttatctggggcgttccggctatgatctgcattattggagtcgggctttacttaagtatccggaccggcttccttcagatcagaaaatttccgtatgcgatgaaagtgacgatcggaaggatgctccgcaaaagagatgcatctgacggtgcactgactccgttccaggcagtttgtaccgcattggcggcgacggtcggaacaggaaatatcgccggagttgcaggagcaatcgcaatcggagggccgggtgcagtgttctggatgtggatctcagcacttcttggaatgtgtacaaagttttcagaagttactcttgcagttcatttccatgagacgaatgcggaaggagatcgtgtcggtggaccgatgtattatatcaaaaatggtctgaaaaagcattggcactggctggcttatctgttcgctgcattcggagttctgactgtatttggaacaggaaatgcaacacaggtgaatacaattacaacagcaatcgattctgcactttttaattatggaatcatagaaaaggattctgttggaacattgaatctgattatcggaattgtacttgctatcctgatcggcatgatccttcttggaggaattaagagaattggacaggttacagaaaagcttgttccatttatggcagcaatttatgtgattctggcacttggcgttgttgttctgaatttccagaacattccgagcgtatttggatccattttcgaaggcgcattttcaccggcatctgtgaccggaggcgccgtgggatctttctttatgagtatgaagaaaggtgtttccagaggaatcttctctaatgaggcaggacttggtacaggttctatcgcacatgcatgtgcagatacgaaaaagcctgtaaagcagggatttttcggaatctttgaagtatttgttgataccattgtaatctgtacattgacagcactcgttattctgtgcagccgtgttccggttggatatggagaggcggcaggagcagaacttactattcttggatttacatccacttatggaaactgggtatctatctttacagcggttgcaatgtgctgcttcgcattttctacgattatcggatggggattatatggaacaagatgtgtggaattccttcttggtacaaaagcgaataagccattcatggtactctatgcactcgttgcaattgtaggtgctacaatggaacttggattgatgtggaatatcgcagagacatttaatggtctgatggcaatcccgaacctgattgcagtattcttattgtcaggtgtagttgtaaagcttgtgaaagaatactttgcgggtgaaggaaaagaaagttaaaaataaaactagatatagaagatttaaagctctggtgttttttggaatcaccggagtttttttaatcgagcaataaaaacatcttatatccccccacctggcttgtgggtttattctgtttcttatacaataaattgcattgaaagaaaatagacagcatgaggagaaaacgatgaaacgaagaaaactatcacaggtgatcgtggtaaccttagcagtctgcacgttggcaggttgtgtacttacaggctgtggaagcaaatcagacaatgcaaataaagagactacacaaagcgggtctacattaatctatggaagtaatgattacacaaggatcaatccggctattgatgagcatggagagattaatctgcttctgtttgacggtctgacagcacatgatgagaataatgaggtagtaccgggactggcagaatcatgggagctggatgacgcgacaaatacttatacattccatcttagggatgatgtaaattggcatgatggagagaaatttacagcagatgatgttgagtttacgatcaaagcaatcatggatccggacaatgaatcagagattgcttctaattatgaggatgttacagcaatcaatgtgatcgatgataagacgatttcttttacacttcgggataagaatgtggcatttctcgactatatgacaattggtatccttccgaaacacttactggaaagcaaggatatgcagacagatgaatatttccataatccaatcggaacgggtccgtataagagtcaggagtgggatgaaggacagagtattacacttgtaaagaatgaggattattataaaggagctccgaagattgatacgatcgtgtttaagattgtaccggatgataatgcaaaggcacttcagttaaaatccggtgagatcaatctggcaaaggtgacaccgaaggatgcacagaatttcacagatgatgatacttttacagtatatgatatgaagacagcagattacaggggtatcctttataactttaataatgagttctggcagaggaacaaagatgcaattccggcaatcagctatgcaatcgatcgtcagaagatggtagacagtgttcttctgggagaaggaattgtagcttatggtccgcttcagagaaataaatataataatgaagatgtagagaaatactcttatgatccggcaaaagcaaaagaagtgttagaagcggctggctggacattgggagatgacggaatctatgagagaaacggagagaagctttcttttacaatcaatgtgatggaaggtgatcaggtgcgcgcagatcttgcggctatcgcatgtcagcagctgaaagaagttggagttgatgcaaaagcacaggttcagtcagaaatcgactgggcaaatcaggaagcatttttgatcggatggggaagcccatttgatgctgatgaccatacatataaagtgtttggtacagataaaggaagtaattacagtggatattccaatgaacaggtagacacttatctgacacaggcaagacagacaagtgatgagaatgagcgtaaagaagcatatgcaaagtttcaggttgcacttgcagaagatccggcatatacattcttctgttattgcgatgtagattatgtgacgaataagaagatccagggaattacaaaggatacagttcttggccatcatggtgttggaattttctggaatgtagaggattggacaatcgaatgaaaatagaagaaatactggcagtgaagcatttgtcagttgaatttcaaacttcagatggaaagaaacaagtagtaaaggacgtctccttgtcgttaagacaaggggaggtccttgctcttgttggagagtcaggatgtggaaagactgtattgtgccgatcaattttgaaattactgccaaagagtgcctctgtgacaggcgaagccattcaatataaagatcagaacctgatcggatataatgaaaaagagatgcagcagatccgaggacagggaatcgcgatggtctttcaggatccacagagcacgttaaacccgacgatgacagttggaagtcagatggaagaggctatttttctgcatgaaaaagctttaaatcagaaaaaaagagagaaagatttcgagaaaaataagaagaaatcaacaaaagagcgggcaatcgaactgatgaagctcgttgggatcaaagacgcagagcagcgttatgatctgtatccgtatcatttttccggcggaatgcgtcaaagatgtgtgcttgcaacagcacttgcctcaaatccaaagcttttaattgcggatgaaccgacgacagctctggatgtgacgatccaggcagagattctgaaactgttgaaaaaattacagaaagaattgaatttaagtattctgtttatcacacatgatcttggagttgttgctcagatcgcagaccgggttgctgtaatgcagaatggaaaaatcgtggaattggaagaagcaaaacagcttttcacagctccaaaacattcttatacaaagaaattgattcaggatcatccttattatatgcatagaaatgaatcaaaattaataagtgaatcagaattgcatgaaaaactggtagaaatctcacatttgtcctacttctatcctttggatagaaaaagggtgtttcaagcggtgaaagatgtgtcctttgagataagaagagacgagatttttggactggtaggtgagtcaggatctggaaagtcaacggttggaaaatgtctgatgggaattctaagtccagaagcagaaacattttcttatgatgggataaatcttcttgataaaaaagcaaaaaagaaaaatgcgagaagactgcaaaaagagaggcagatgatttttcaggattcaacatcttccttaaaccagaaaatgaaggtaaagaagatccttgcagagccattggaaatacataaagtattttctgacaggaaagaacagcataaatttctatgtgaaatgatggaagaggtagaattagaggaagaacagcttcaggtacgaccaccggaattatcaggaggacaaagacaacgtgttgcaattgccagagcatttgcaatgaagccgaagctcttgatcgcagatgaaccaatcgcttcgttggatgtaactacacaggcacagatggtgaagctgtttcggcatttacaaagagaacatgactgtgcaatcctttttattgcgcatgatctttcaatggtgcgtctgttgtgcgaccgtgtcggagtgatgaaggatggaaaacttgtggagataggagaaaccgagcaggtgtttgaacatccgcagcatttatatacgaagaaacttctggaggcgattccgattccggagatttcaggagaggagcagagtgatgaagaaacaatggcttagaaaaatcggactgatcttgctatctgtttttgtgctctcacttcttgtgtttgtaatgtcgcggctggcacccggggatccgctggtttcttattatggagagcgtgcagagaggatgtctgtggaagaacatgagcatgcaatggaacgacttggattaaacgaacctatccctgttcagtatgtgaaatggcttggaaatgcttttcatggggattttggaatctcttataaatataaacaagatgttcttacggtgatcgagggacgtttagtcaatacattattgcttggcggaattggttttatcctgacatttggactggcacttttgcttggaattttctgtgtgtattatgaaaatcagcttccagaccggattttgcgtaaggcgggaacaatcacaagctgtattccggaattctggttgtcacttatattgattttgatttttagtgtgaatctaaagctccttccgggaagtggggcatatgatttcggacaatcggcaaatccgttgagcagattgacgcatctgattcttccgctgacagttgttgtgctgagccacctttggtattatgcgtatctgatccgtaaccgattgttggaagaaactagaaaagactatgttttactggcaaaggcaaaaggaatgtcacgaaaaagagtattgttctttcactgtgtgaaaaatattatgccatcgtttatcagtctgatggcaatttcacttcagcatgtgatcgaagggacgtatatcgtggaaatggtattttcctatccgggaatcggaacgctttcttttgaaagtgcaaaatatcatgactataatatgctgatggtgctttgcgtatttaccggtatttttgttattgcaggaaatgtgatcggacagtctgtcagtgaatggatcgatccaagaataaaagagataaaaatgacaggaaaggcaagtcaaatataaggtggagaagatgagaaaagctgagaagaataatagttcatccgaaaatagaataaggacattcaaaatgaatgattttggaaaaaacaagtcttctgtaattgccggaagtattcttgcagtcatcgtatttgcctgtgttttctgtcgtttctttatgacgaaagaccctacatacatggatctgaagaactgcaacatttcaccgaataaagagttcttttttggaacggatacgatgggaagagatattttttcaatgattttatacggtggtagaatatcgctgtttatcgggttgatatccaccgtgttatcgactacgattgcggtgatctacggatccttcagtggaatcgcaccggagtggattgatgaactgatgatgcgttttacagaaattttattgagtattccttcaattctgttaattatctttcttcaggcactggcaggaaagaactcggttgttgcaatcaccgttgtaatcggtctgaccagttggatgaatatcgcaaaaatggtacgcactgaggtacgacagctccgcgagagtgaatatctgattgctgcaaaatgtatgggtggaagtttctggcatattttacgtgcacatttgctgccgaattttgtttcgtcaattatgtttatggtcgtgatgaacatcagaagtgcaatcatagcagagtcaacattgagcttccttgggattggtcttccgatggaaatcatttcctgggggagcatgctctcgctttctgaaaaggcattgatgacaaactcctggtggatcattctgattccgggaattgtgcttgtgatcacgttactgtgtattacagagctgggagaagctttgcgtaaaaatgtgaatcagaaagaaggaaatttatagagaatttctatagaatagtttgataacctatagtaaaaatgttatactgaaaaacagaagcctggaggttgaaatacctgaacgaataggtaaaggagagcaatagaatggtaacagtaaatgctatgggagataaatgcccggttccggtaatcaagacaaagaaagcattagatgctttgacagctccggagacaatagaagttctcgttgacaatgagacagcagtggctaatgtgactaagatggcacagagtacaggcgcagcagtaacacaggagaagcttggagagaatgaatataaagtgacaatccaggcacttgcaggagaaggaactcagacagcaccggcgggtgcggtttgcgattgtgttccgacaggggatacggtagttgtgatttcttctgacaagatgggaagtggaaatgatgagctcggaaaagtgctgatcaaaggttgcatctttgcaatcacacagcttgatgagcttccaaagaagatgatcttctacaacggtggcgctaagatcacatgtgaaggatctgactctctggaggatctgaagaatctggaaagccagggcgttgagattgtgacttgcggaacatgtctggattattatggaatgaaagacaagcttgcagtaggaacagttacaaatatgtatgacattgtcgagtctatgaataatgcaggtaagattgtgaaaccttgttagaaacataggaacagttacagtaatttgaaaatgtgatggaaaagctgctgcaacagcttttttgtatatcgagggaattattttgaaaaagcattcgaaaggaagtgggcgaaatgagtaagggactcaaagagattcatctgacacagatgacaaagacagctggttgagcggccaaaatcggtcctgagacccttgcccaggttctgggtaagctgcctaaattttccgatgagcgtctgcttgtcggtgttgagacatcagatgatgccgcaatttataaaatatcggatgagactgccatgatacagacactggatttcttcacaccggttgtggacgatccgtatctgttcggacagattgcagcggcgaactccttaagcgatgtatatgcaatgggaggagagccgaaggttgcattgaatattgtatgttttccaaattgtctggatccggagatcttaggggagattttgcgaggcggagcagacaaggtgttagaagcaggagccgttctggtcggaggtcattcggtgcaggatgatgaaccgaaatacggactctcggtaacaggcttcgttcacccggataagatttataagaattacgggtgtcagccgggagatgtgttggttctgaccaaacagcttggaagtggtattgtgaatacaacagtgaaagcacagatggcttccgaagcagccgcagatgaagctgcgaaagtaatggcttcattgaatcagagggcgaaaagagcaattgagaaacacacgatccacgcatgtacagatgtgacgggatttggattgctgggacattgtacagagatggctgaggcaagtgacataactctggaattatatccggagcagattgaatatatgacagaagcgattgcatatgcaaggatgggactcgttccggcaggagcatataagaaccgggagtttgcagcggaagggctggatgcaggagacgtagaagaggtctatttagatctgatcagcgatccgcagacttcaggaggacttcttgtcagtgtcccaagagaagaattagacagtctgttagcagactttgaggcagtgggaatggagacgaaagtttctgttgtaggctgtgttaaagagcggcaggaaaaactcatccaactaaaaaaaggaaaaatggaaatgctgtaagagatttcttgttactgttcacagtgttctgtgagcagtaacggtttcttgcggcatttcgctgtagaaagagaaattaaggagcagcagtagttggaaaagtcagatcagaataagaaaagagaaaatttacagaaagaaaagaatcagatctttcgcctgcttccgcgagtagatgacttgatgaagaaagaaaatgttcagagactggcagagaaagaaggatatgagcgtgttctcggagcagtcagagattctgtggagaatttgagaaatgaaatctcacaaggaatcaaaaagggaaccagtgagcatgaagcgaaagaaatgattcagaaatttctgtatgagatagaatcaagttcaaagaaatcagaagtgaaccatcttctggaacaagaacagaaaaaggagatccaaccagtttataacggaacaggagtaatccttcataccgggcttggacgtgcaacgcttagtcatgagattgcggaaaaactgaaagcagttgcagagaattattccagtctggaatatgatttacagactggaaaacgtggaaacaggaccggatatgcagaagaattgctttgtcagatcacaggagcagaagcggcaattgttgtgaataacaatgccggagctgtacttcttgccttgagtgcattgacaaaaggaggagaagtgatcgtctccagaggagaacttgttgaaatcggagggaaattccgtattccggaagttcttgaattaagcggtgctattttgaaagaagtcgggacaaccaatcgtacaaggatagaagattataaagcagcagtcagtgaaaagacgaaagcatttttgaaagtccacacaagtaattacagaattatcgggtttacagaatcggtaagtgcagaagaattgtatgaattaagtactggtctgatagagtgcacgcaggaattgccacctgaaaacttcgagaatcatacggaacgaagcggaattccagtgattgaagatctgggcagtggtgtacttataaatctggaggaatatggtttatccaaagaaccaaccgtacaggaagaagtaaaggccggtgcagatgttgtttgttttagtggtgataaactatttggtggagcacaggccggagtccttgtaggaaagaaaaaatatattgatcagatgcgtaatcatccattgcttcgggctcttcgagcagataaatttacaatgacagcaatagaagaagtgttgaaatgttatctggatcagaaagaagcagttcaaaagattccaacgctgagaatgctgacaagacctgtggaggaaataaaagagaaagcaatggtctgtgctgatagatggaatcaagagggagcgtccgttcagattcaagtggaaaaatgtatttctaaggctggtggcggtgcacttcctgagacggagattccaagttatggagtagcattggaatcaactgagatcaccgttgaagaattagaaagcaggatgagaaatctttcagttccggtaattggaagaataaaggaagggcgtttccttctggatatgagaactttctcggaagaaggaatcgaatatctggcgacacagatcagacatattatggaaagaaagcataactaagaaagaaaaacagcattaagaaagggactgcattagatggaaagacatgtgatcatcggaactgccggacatatcgatcatggtaagacgacactgatcaaggcattaacgggaagagatacagaccgtctgaaagaagagaaagcacgtggaatcacaattgatctagggtttacatggatggatttgacagacggagagcgtgtcggaatcattgatgttcccggtcatgagaaatttatctctaatatgactgcaggtgtggtaggaatggaccttgttcttcttgtaattgcagcagatgagggagttatgccacagacaagagaacatctggaaattttacgccttctcggtgttgagaatatccttgttgttttgaataaatgtgaccttgtggatgaggaatggctggagatgatagaacagcagatctgtgaagaaatgcagcagctgtttacagtaggtcagagaaatgatcaggtagaagataagctggaatataatgtggacattgtacgtgtttcagcaaaatcaggagccggaatagaagaattaagaaatcaaatcctgaaatgtgtaaaaaagcagaaagaaatgtggaaaatccctgcatttccaagacttcctgtggacagagtattttcaattaaaggaagcggaacagttgtgacgggaacacttcttgacgggaaaattcattcgggagatcgggtgatgatctatccacaacaaacttcgtgcagagttcgtggagttcaggtgcatgagcaggaggcagaagcttgtgaagcaggtcagcgaagcgcactgaacctggttcagacggaccgaagacagagcagtgatgggaagtttgtgtatcgaggaaatgtgattgcaccggaaggaagtatgaaagtcagccgctatgtgaatgcaaaactgacccttcttccacaaagtaaaagaagtgttgaacatcagactcgattacatttttatagcggaacaacagaagttctgtgcagagcagttccgttgtcctgtgagaaagttgagccaggggaatcagcctatgtccaattaaggttagaagaacctgctgcgttttgtccgggggacaggtttattgtccgattttattcaccactcgagacaatcggaggaggaattatccttgaaatgggagaaaaaaaagagcgaaaatatcatgatggggttttacaaagactggaactgttggaaaacaatctttggaatcaagaaaataagtgttcaaaggaaatcccagatcgagaaaagagcctgcaggaacagatttctttagaaaagagaattatggatgaattggaaagctggttgtctgctcatccatatcgaagaggaatgccaaagacagttcttttcaatcagatcagcaaagggaaaaaggaacagaatcgggaaattcagaaatgtcttatactattggaggaacatggaaatgtcggttgtataaggttgcaacaggaaaattccagtatagagctgatttctccggagggatataaagtaaaagagacggaagaagtttctaaattaagagaaatctttgccagtcaatcagatgagaataaagttttctttttgaacaaagtggaattggaaacattttttgagtcagcaagaaaaacgaaaaagaaaagtggaatacaaagtcaagatgaattgatggaaattctgaattatatgcaggaagaaaacgaaattacagaggtttgtgagagtgtttatacaacaacagagattacgtttaaaattagaacagaagtaagccgtatgttatctgtatctaaagtgattacactgagtcaggtgaaagaagtatttcagacaagcagaaaaaatgccagattgatttttgaatatacagatcgaatcggatttacagcaaaagaaggtgcacagacagaacgctccgcaggaaataaattgcaaagagaacaaatcagaggaaagtaaggggagagtgaatgaacttaaaacaactggaagcatttgtgaaagtagcagaaacaaaaagtttttcggaagcggcaaagcagttattccttacgcagccaactatcagtgcacatgtgtctgcattagaaaaagaactgaatacctgtttccttataagaaatacaagaggagttgagctgtcagagagtggaaaagagctttatgcttatgcggtacaaatgcttgaaatcgaaaagacaataaaaggacggtttggaaaagaaataaaaccggagggaaatgtacttcgtattggtgcttcaaccgtaccggcgcaatatattcttccaaatgtaatgtctacatttcatgcagaatatcctggtgaaaaattgaagctttttgagacagacagtaaaggagttatcgatatgattctttcccatcatattgatattggatttacaggaaccgtgattgagaaaggaaactgtaaatatcttccattttatgaagacgaattagttgtgcttactccgtcaaatgagaaatttgttgaaaagctttgtggtggacaaatattggcggattggatcatggacgagccggtgatcttaagagaagaaggatccggaacaaagaaagaagcagaaaaaatgctggcagaacaagggattgatataaaaaaattgaagctggcagcattgatggagaatcaggagacgatcaaaagatctgtaagtaaagggatgggagttacgattttgtctaaacttgcggcagaagaggaattgaaaaatggaacacttctggcttttccactgggcagtcaaggtggaaagagaatgatcaaccttgtctatgatgcagaatatccgttgcttccggcagcagagcgttttataaagatgataaagagaatgtatttgaagaaagaaaatacagggataggtgaatgcaaataacacgccctatttatagaaaaagcctataaatagagcagatccattacggattcctattagacggaaacagaaaagagaagtatactataactagtgatttgtatctaaaaagtaaacgatataaacacatacagaaaggaagagaagccctatgatctacatggataatgcggcaactacattgcagaaaccggaagaagtaaaagaggcgattctctatgctctcgagcatatggggaatgcagggagaggcggaacagaagctgcactggatgcttcgagaagtatctatgcagtaagggaaaaacttgcagattttttcaatgcagaaagtccgacaagaattgcatttactgcaaattctacagagagtcttaatattgcattaaaaggtttgtttcaaccgggcgatcatgtgatcacaacagtgctggaacataattcggtattgcgtccgctgtattggtgtcaggaacagggagtagagcttacaattctaaactgtgacgaaaagggaaatctgtcatatgaagagatggagaatgcggtgcgggacaacacaaaagcaattgtgtgtacgcatgcttcgaatctgacaggaaatatgatcaatctgaaacgggtaggacagattgcatcgaagaagcatattttgtttgttgtggatgcttctcagacagcaggtgtttatccaattgatgtgcaggaacttggggttgatgtattgtgcttcacaggacataaaggtctgcttggaccgcagggaaccggagggctttatgttagggaaggtgtggaaattcgtccgcttctgtgtggaggaagtggcgtggatacttataacatgcatcatccgtcccagatgccgacggcacttgaggccggaactcttaatgggcatgggattgcaggacttggcgcagcgattgattatctgaaccgtacaggaattaatgtgatccgtgagaaagaacttcatctgatgcgcaggttttatgatgggatttctcagatcccggatgtgaaagtctatggagattttacagcagaggaaagagctccgatcgtgactttcaatctgggagattatgactcttctgaagtcagtgatgaattaaatgaagtttatgggattgcgaccagaccgggagcacattgtgcaccactgatgcacaaagcactcggtacagtagaacagggagctgtccgattcagtttttctcattacaatacagatgaagaggtcgattttgcaattcgtgcaataaaagagttgtagagaaagagaggaaaaggaaatgaatttgtttgattcaaagaagaaactgggaatcgccggtgtcgtaatgggtctggtagcagcaacacttgcttattttggtaacccagcgaacatggcaatctgtattgcgtgttttgtacgtgatacagcaggagcacttggacttcattccgcagagccggtacagtatgcaagaccggagatcatcggaatcgtcctcggtgcatttattatttcaattgcgacaaaagaatatcgtgcaacagcaggatcttccacaatcgtacgttttgtactcggaatgattcttgtgatcggagcacttgtattccttggatgtccgcttcgtatggtgatacgtatgtcagccggagatctgaatgcatgggtagcactgatcggatttgctcttggtgttgctacaggcgtgtttgcactgaagaaaggtttcagccttgggcgtgcacatgtgacaaataaagtgagcggaagtgtacttccacttcttatgatcggagtacttgtacttgcacttggaacaaatcttttaaagagtagtacagcaggtccgggaagtatgcatgcaccaatcattatttctttgatcggtggacttctctttggagcatttgctcagaaatcaagaatgtgtttcgcaggaagtatccgtgatatcattcttatgaagaactttgacctgatcacaatcgttgtaggattcttcgcagttatgcttgtatataatgttgcaacaggacattttgttcttgcattcaatacacctggagtgatcgctcactcccagcacttgtggagtattcttggaatgtatgcagtaggatttgcagcagttcttgcaggaggatgcccgctgcgtcagcttgtacttgcaggtcagggatcatctgatgcaggagtaacagtgatcggtatgtttgcaggtggagcacttgcacataaccttggcctggcagcaagtggaacagcactgaatgctgagacaggtgagattgtagccggagctgttccgccagccggtaagatcgcagcaattatttgtattattgtatgttttgtaatcgcatttacaaacaagagaagcgaagcaaaataaggagaaaatagttatgagagaagtagatgcaagaggattatcttgtccagaaccattgatgctgacagcagaagcgattaaaagtgacaatagtccggtaaaggttcttgtgacagaaccacatcagaaaacaaatgtggagaaatttgcaaaggatcacggaaagaaaacaacagtagaagaaatcgaagatggatttgctgttgtgatcgagtaaaatgaaatagtaaaaagccctgctccctttactgaatgtgaatttggtaaagggagcattttagtaataaaaaatgttttctatttgtctggtttcggttataataagagagttgagaaaaaggaaaatgtgaggataacagcatgtatatttcaacaaaatatctgcatgtatttcttgatatcggagatgcgctgctttcaagcggggcggagatatttcgtgtagaagatacattgaaccgtatgggatatgcatgcggtgcaacacagatgaatgtgttcgtgatcacatcgagtattgttattacaatggaatttccagaagaaaatgtacgaactcagacaaggagaatccgaaagaccggaggaaatgattttgagaagctggagaaattgaataatttgagtagacagttttgccagaatcctatgtctcctgaagaactcagggaagtcttcgatcagattgacaaagttgttccgacacagacaggaaaactcgcagggagtattctggcagcttttagctttgcacttttctatggaggaaatctttgggatgcattactggccggattagcaggcatcttaatctggggagcacagagacatataagaaagtattgcatgaatgaagtgacgtttcaatttgtggcatcatttcttgcgggatgttttatttgtgttatggcgaggttttttccggctctgcacgtggataagattatgattggtgatattatgttattgatcccgggattgatggcaaccaatgcaattcgtgatatattgattggagatacgatatctggggttatgcgttttatagaggcaatgcttcttgcagcagtgcttgcacttggatttatcggagcaatatttctgattgggaggattggttgatgacgtatattgttcaattatttacaggtgcagcgggttcggttgcatttggcatactgtttcatatgaagaagaaacaccttccattggcggcacttggcggttttctgggctggctgttatttatcatctgcagaggattctggggaggtgtgttcttcccaacattggcagcagcttttggaatcgacttatatgcggagatacttgcgcgtagttgcaggagtacttcgacttcattttttgtaacatcggtgattccactgattccaggaagcacgctttattattgtatgagaagtgttgttgaagggaatttacatcaggcatggaattatggacgagatacatttttatatgcattggggattgcggcaggtatgagtattgcctgggcaatctgtgattttttaagaaagataagaggaaaacaggagatctcataaatgagaaagaaagaattaaaacttgtggtgacatttcacacaactgcggatgcgatggcgatggaaaaagcgtgcaaggcagaggaggtaccgggcagactgattccggtgccaagagtaatctcggccggttgtggacttgcctgggcggcaccgcttgaggcggtagaacagatcaagcatgtaatgcaggaaaaggggattgagagagaagaacttcatgagtgcatggtctaatctttggattcaaggcaaaatgcgcataatctgtgttgaacagtggagcgatagatatggaagtgaaaagtaatcatgtttccaaaaaagaaacgagaatatgagaatgaacgttgattctgagggcggtttgcgctatactctattcagtaataaaagaaaaaaggttactgttcacacgagagtgtacagtaacgaaaaaagtgctgctcacagatcagtgggagcggtaatgaaaagactgctgatagttcggcagagaaggagcataatatgagaattacagatgacattttatatgtaggtgtaaatgatcacaacattgatttattcgagggtcagtatatcgtgccgaatggcatggcttacaattcctatgtgatcaatgatgagaaaattgcggttatggatacagtggatgcagcttttggcgatgagtggctgaagaatattgcagatgtattgaatggagcaacacctgattacctgatcattcagcacatggagccggatcattcagcaaatattcagaaatttctggaagtatatccgaatataaaggtggttggaaatgcaaagacatttacaatgatcggaaacttcttccgtgacctgaaacttgcagacgagaacaagctggaagtgaagaataaagatacactgacacttggaaaacatgagcttacatttgtatttgcaccgatggtacattggccggaggtaatggtaacatacgatagcaaggataaggttcttttctctgcggatggattcggtaagttcggagcgcttgatgtagaggaagactgggattgcgaagcacgccgttactatatcggaattgttggaaaatacggagcacaggttcagaatcttttgaaggttgcagcaacactggatattcagacaatctgcccgctgcatggaccggttcttacagagaatctggagcactacattggacagtataatacatggtcttcttatggaacagaatctgaaggtgttatgatcgcgtacacatctgtttatggaaatacaaagaaggcagttgaacttcttgctgagaagctgaaagaaaaaggatgccctaaggtcgtagtaacagaccttgcccgtgaggatatggcagaggctgtagaagatgcgttccgttacggtaagatcgttcttgcttcaacaacttataacggagatgtattcccgctcatgaagacatttatcgagcacttgacagagcgtaactatcagaataagacaattggtctgattgagaacggatcctgggcttctatggctggtaaagtgatgagaggcatgtttgagaagagcaagaatatcacatggcttgagacttcagtaaagattatgtcttctatggatgagcagaataaagcggacatcgagaagatggcagaggaattgatgtaagcaattttgatttacaggaaagattctgttaggatagaatcagatggcggagcggatgaccagatatcagctggcgtttgctccgtttcttaataaatacatcaatgatgaattgtctaagcattatggaggcagaagagtaactggtgtgcttcctggtcttcaaaaccagtgtggggcgtggtacgtcccgggtgggttcgattctcacatgcctccgccaaaagaaaatatgttattagtggaaagtccttttataacaagggttttccgcttttttattattcggaaataaaattatgttgttgtcacgatttgtcacgttttttagttcttcattactagatgttgtgttatcccctaaagcactcaaaatcgacttctttgtttcctcttcgctgtttgtattaaaaacataatacttcattgttgttttttcatctgcatgaccagaaatcttactaactacactcaatggaatatcttgtgatgcaagagtagaaatccatgtttttctgattctgtgtgttccctttaaaggaatgttaatacaacgcttgcaaatatctctgagaagattatataacttgttgggatttactaagtaaccgttctgtacaaacaaaaaatcttgataacattccccagtctttttgttaatctcttgtatctgttttatatactcttgtgccttttgtgttaatgggatgtatctgtctcctgcatctgacttagtatattcaactgcgtgccatccagtgagtttaggattacttatagttgatatatcacagtctactataacttgcctgtgaatgtgtattttgccattctgtacgtctgaattcttaattgcaagtatttcccctctacgtgttcctaactcgaattcaagcattatagcaaggatatttgtgtttgttggattgttctgcaatctacggtttagttcatcaaagagtaactgtttctcatgttcgttgtagacttcttccttactggatttctttctggttcgtatgatattctttttgtttacctcaacacggtaaggattctcgtttgctgatatataccttgctgagactgcataaccaaaagtttgttttaggattccacacatattgcagaatgccttgtctttgatttctgttgtgttcactatgttatttaggaaatcatccacgtcaataggtgtgatgtccttatatggcttgtttataaattctggctttatttgataatatctcttccagtcatataccatacgtcttatagttcctacgctgaccttttctttcttgtgttccatgaactcatagaaaagttgctctaatgtcatgttatcatcttgcaaggatttgagttgttccttttccttgttaagatagtactcacacaatgcagattctattttctctctagttgttttctttctgcggtaagctcccccttttactgatttgtctggaatacggaaatagtagtagctttctttgtcggtactataatatttaatctcgttcccatgttttgccaaaatgtctgttttcttcatatcttctatgttttccagtacacctgttgtatttatcatactattagaacaactggaaacgcaagcatcaactttgaaaagttcattaaaatcaagtatcataatatataaatcctcttatcttatctaaaatctatcattgttttgttctccttatctgttctcttaatctgtttgctatggcaagattgcttgtatcaatctatatgacaaattactatttgtaacatagaacaaacacaatttgaaaacaatttgttacaaacaaccttgtcatagtggctattctgttctgttttactgtaaaatatgttctgttttgaatgttctcttgaaattgtatagtcaattcagacattttttgttttgtggtttacactcatttcttgcattaatagataaataacacaatcttctgataatctctttagaacgctcttcaatgccctatgcagtagaagatatgataatttatgtgtttgcttataagcgtctgttgcaatctcatagacttcctgttctgtgaattggtggttattttccatttgttctccctcctagcttagttcatccatgtactttagaacatgattataattaacataatatttgttgctaatctttacatatggaatcttatgttcctcaacaattatctttcttaataactgatatggaagttttgttttgtatgccagttcgttaatacagagtagtggtggggcatctggcaactcgttcataacataatttttccttacttgtaagcttttgagcctttttgattgtgcgactctctttgcagtctccgtcaattctcgtgatgaaacaacttttttcatacgctatccctccctcatagatttttttaaatcattagatacttgcttttgaatatgtcttaattggaatccctccatgtacagcttacttagttctgcctgtttctgatctaacagtggcttgatggcttgttcgtgctttagttcctcttgattctttgcattttctacaatgacttttctctgtctgtcagtaaaataactggaatattgaggtaggctagacaatttctgtagtgctatagcttgtacacgtgttggattcttgcaccaattaccaattcttctgcgatcaccgttctcctgtatcccattagtatgcaattctgccatgtatgaataaagaacattgttactctcatattcaagtctctgtaattgttctgtgctttcttcaatacgaatggctctaatctctgcaatctgtgtttgttttatttccatctgcttgtcattttgttctaagaggtctgtgactttctggtcaagcattttacgcaatttatagatatcaagtgtattgactccctcttctttggaaaacacgttcagcagatttctgcaagaaatatattgtttcgctgtttccatgtttgatatttcattgaatacattgttatgcattctaataagtcgttcttgctgtctctctagctctgccattgttttatttgttttattgttacgactattatttgaactattaaaatacattcttaaattctcctttcatattatgccctgtggctttgtatttacgccatttaaggcttttatgtgtattggtatacatttctctatggtttatatatctctgcgccccatgatggctctttccatggttcagagtcgtcattttcgttgtctgtgagcgtttctgttatctcgttgtttatatcatttacatttatgttctgttttgggtttactatctgtagcattatttttgtttcggtgttctgttctgtttcatctactatagctttgtaatccttgccataacatttatctaaaaggtattgatttgctttcaatcttgtatttgcatcaaaactgttctctgcgattgttatgatatttttcaatgcctttgtactgtacgtcttaagttccctgtcaaaatcttctttgttttgtttcatgcctaccgataacggctttcttccttttgccacaccaatatcaccacctttgtcatattgttatatccttaacctttagtactattttttaaagaaaatcaacggtttttcgcttgttctcggttgttctacgggacactactgtcccattttatgtccctgttatccatagattatacccttgcataacataacaaaatcatctgctacattctcatgtatttcaagctctccacttttacgcactctgtaaatagttttcctagcactttctggattatcataatgtaagtaacaagccttagcaaaaaatgagaaatcttgttcaatgattgttctgtttacaagtgctgttgttaatggcttacaatgttttaaatcagataatatcatctgtatgcactgtttatagtatggtgtgctaccaatgttgttccagaaccgatcacaaaaatactttttaaaatcagacttgaaacattgtagcaaagactgtattgactcaactgttagaaaatcattcaagtatcttccagttttagcaaaatctaaaccacttctgttatagatatgttcgattctgattataccttttttatcctgtatcccctgttcaagccctttattatatattttctgtgagaatcgccctgtactattttgtggtagtttcaacgattctacattcattccagatgttaatgtttcgactttcttatatctctgtccgatctgctttccccgtacagttaaatgagcaacgtttgttctatcctgtaatagcatccctgttatcatgttcagcattggttgtacattctctttatgtcttaggacaactgtagcattgacttccgcaaccctaacttgcaattctggaagataatctccaaaatattctcttaattgttctgttatcgtttgagttacctcatacagtttacatgcatccacaacaccaaaaggctctatgttatttgttctgatgcacttaggaagattgatattcaatctatacccgtgtgttttaccttgcttgtgtttcaattctccgatcttgattcctgtattgctttcgaatattacattgttttctattatttcaactggcgtgtcaataaccacttctattgtgtcaattcctaacattgtatgctgtttatcatccattgtttttgtttcctcctgttttccaattaaaaaagacctagcaagaggaagatgtggtggcttcctgtgctggtcttttttacataaatgaataaatgagagcgaacaaactcacaaatatcaaaagcatggctctttaggttctgatttaatatgttacctttttacataaccatgagcagataacaatagagaaacattccacatggactccataacaactataattatttcaatattcaatttcttctagtttgttgaaattattgcacgaactgtgcaacctatgatttgttttataacatatattgaaaatatgtctttttaacttgaacagtttaactaactttataaatatataatacacccaacgaaaattaatgtcaaccctttgaaaaatatttttgaatttttttaaaatttatggtataataaataatttaatcatattcacggaatacctccgtaagcctgtgtttgcccctggaatccattttattttaggcaaccaataaatatgcctttatggggtaaaatggctatatgagccttatagaagtttattattataaatggggtaatttgttgcataacatcaattattctgttatagtgtaggcaatatttatataaaagcggagaacaaaaacaatcatttaaacatatcagaagagtgataggcttaaatcattattcttaattataaacaggtgtgctgaatactcctttctatatgttgtatggtgtcacgaagctgtcacgttcgtttctgtccagttcaaaaaccttgattctacagggatttgtgaaattgccatgtgggttcgattcccacatgtctccgccaaaagaaaggaaaaagaatatgggtatgaatcagacgccggtgtccgaacgagtgcacatcggcttttttggtaagcgcaatgctggaaaatcaagcgtgatgaatgcggtaacaggacaggatcttgcggtagtttctgatgtgaaaggaacaacaacggatccggtttataagacaatggaacttcttccgttgggtcctgttgtgatgatggatactcctggaattgatgatgaaggtgaactgggtgaacttcgtgtgaagaagagctatcaggtgttgaataagacagacattgctgttgttgtgattgatggaacgtgtggcgtcagtgaagaagatctcaagataacagagcggattcagaaaaagaacataccttatataatagtactgaataaatgtgaacggtttacacaagaagatgagagattgcgggtacaggaaaataccgcaagttatttgaaaacagagaaagagaagattcttcttgtaagtgcagcggataaaagcggaatttatgagctgaaggaagaacttggagcattgaaaggaaaggaagaggaagaacgaaagattgttggagatcttcttgaaccgtccgattttgtagtacttgttgtgccgattgacagtgcggcaccaaagggacgcctgattttgccacagcagcagacgattcgtgacattttggatgcagatgcatccgctattgttgtaaaagaaacagaacttgcaggaacattagcttcacttggaaaaaagccgaagatggttattacagacagtcaggtgtttggtagagtgtcaaaagatacaccaaaggatatcttattaacttccttttcgattctatttgcaagatataaagggaatctggaaacaatggtacacggagtaaaggcactggatattctggaagacggtgataaagtactgatcagtgaagggtgcacacatcacagacagtgtgatgatattggtacggtgaagattccacgctggctgaaagagtatacaggaaaagaacttataatagagacttcttcaggaacagaattcccagatgaccttggttcatacaaaatgatcattcattgtggagggtgtatgctgaatgaacgcgaaatgaaatacaggatcagttgcgcacaggatcaaggaatcccgattgcaaactatggaatggtgatcgcatatattcatggaatattgaaaaggagtctgagtccatttccggagatagaaaaactcttataaaagtaaagaatgcgttactggtcgcacatcgtgtgaacagtaacaagaatgcattataacggaaatgacgccgctttgctggatctgcaactccagcaggcggcgtcatttctatggtatgtaattgagaggatcctttagttaccagacagaaacatctgcacacgaaactggggaattcctacaaagaggctgtgcgctgacggtactgctgcggcagggatgttcttggggaaaacatccggcgttagcgtactgcatgataactgaagtatctgacctgtaaaaacgaataaaaaaagacagtttctcctaggtaaataggaaaaccgcctttggtcttacaagtcgagataataatatcattcgaacagagtgatgtcaagcatttgagaagaaaaattatgagaatcttaattgggatccggtttaaacacatcatgtattgaataaaaagggggaaataatgatataaaacgagtttcttctatatataatagggaatgaaacggaaaatataataggaagtgaatcaatcaataattaaacatatatacatgagaaaacacaagaataaagaagaaaaagattgtacttgaaaaaaaacaaaaaaagtacttgcaattttgcgctctctcggatatactaagagagctgtgacatgatagcaatgaagcgcgaggttgctgcccggcaaatgaataagctggtgcaggttttccgtggagcgaatgtcaagttaggaaactggcgacaagtcactgtacgaatcaaaaactgattactatttgccccaatgggataaccagggtaggagtatgaaacaacgtgtgagtttctcacgacacacacgggagagtgtacagtcaccgcttgtcgtactgatgtgaaaagtacgaaaaggaggcgactttttttatggcaagtcaagtaatgagaatcacattgaaggcgtatgatcatcagcttgttgatgcatccgcaaagaaaatcatcgaaactgtaaaaaagaacgggtcacaggtgagtggaccggtaccacttccgactaagaaggaagttgtaacaattctgagagctgtacacaagtacaaagattccagagagcagttcgagcagagaactcacaaaagactgatcgatatcatcacaccaacacagaaaactgttgatgcactttctagattagaaatgccagctggtgtatttatcgacatcaagatgaagtccaaataataaggacatcttaattttaaacagtattcctaaaatttaggatgagcgcgaaagcgttccgctgtaaatcacaggaggtaattataatgaagaaagctatcttagctacaaaagttggaatgactcagatcttcaatgaagaagacggagttctgattccggtaacggttctgcaggctggtccttgtgtagtaacacaggttaaaacagttgagaatgacggttacagcgcagtacaggttggatatgttgacaagaaagaaaagattgtcacaaaagacaacagtggaaagaagtccatcgctcacagaaacggtgtgacaaaagctgaaaaaggtcattttgacaaagcaggcgtatccggaaagagatatgtaaaagaattcagatttgagaacgctgaagagtatacacttgctcaggaaattaaagctgatatctttgcggcaggagacaagattgatgcaactgctgtttcaaaaggtaaaggtttccagggcgcaatcaagcgtcacaaccagagcagaggacctatgactcacggttccaagttccatcgtcatgctggttctaacggttcagcatctgatccaagtaaggtattcaaaggtaagaagatgccaggacagatgggtaacaagaagatcactgttcagaatcttgaagtagtaagagttgatgcagagaacaatctcatcctcgttaaaggttctgtaccgggaccaaagaaatgcctggtaacaatcaaagagacagtgaaggcaaactagtctgacagctaagaaaggaggaacatacagatggcaaaagtatctgtttacaatatcgaaggtaaagaagttgatacaatcgaactgaacgatgctgtattcggtgttgaagttaatgagcacctcgtacacatggcagttgtaaatcagcttgcaaacaatcgtcagggaacacagaaagccaagacacgttctgaagtttccggtggcggaagaaaaccatggagacagaaaggaacaggtcacgcaagacagggatcaacaagatcaccacagtggacaggcggtggagttgtattcgctccagttccgagagactattccttcaaaatgaataagaaagagaagagagcagctcttaagtctgcacttacttccagagtagaagagaacaaattcatcgttgttgatgaactcaatttcgacgaaatcaaaacaaagaaattccaggcagtactgaacaacctgaacgttaacaaagcgctggtagttcttgaagatggaaacaagaatgttgagatttccgcaaagaatatcccggatgttaaaacagcacatacaaacacaatcaacgtatatgacatcctgaaatacaacacagtaatcgctacgaaagctgttgttgcagcaatcgaggaggtgtacgcataatggcaaacattcagtattatgatgtaatccttaaaccagttgtaactgagaagagcatggagcttatggctgacaagaaatatacattccttgtacacacaggggctacaaaatctcagatcaaagaagctgttgaaaaaatgttcaacggtacaaaagtaaaaagcgtcaacacaatgaaccttgatggtaagaacaaaagacgtggaatgactttcggaaagacagctaagacaaagaaagctgtagtagcactgacagaagacagcgctgatattgaaatctttgaaggtctgtaaaaaataagacattatacggtgcaaacccgtgaaacaaataatcagagcaaacgaaaggagagacagtaatgggaatcaaaacatataacccatatacaccttccagaagacagatgacaggttctgatttctcagagatcacaaagacaactccagagaaatccctcctcgaatccaagaagagaaaagctggccgtaacgcacagggtaaaatcacagtaagacatcgtggcggcggagctaagaagaaatatagaattatcgactttaaaagaaagaaagacggaattccggcaacagttgttggaatcgagtatgatccaaatagaagtgctaacatcgcactgatctgctacgcagatggtgagaaagcatacatccttgctccagaaggacttacagacggcatgacagttatgaacggtgctggcgctgaggttagagtaggaaactgccttccactttcagagattccggttggtacacagatccacaacatcgagctgtacccgggaaaaggtggacagctggttcgttccgctggtaacagcgcacagctgatggcgaaagaaggaaagtacgctacactgagacttccttcaggagaaatgagaatggttccgatcatctgccgcgcatctatcggtgttgtaggaaacggtgatcacaacctgatcaatgttggtaaagcaggacgtaagcgtcacatgggaatcagacctacagttcgtggttctgtaatgaaccctaacgaccatccacacggaggtggagaaggtaagacaagtatcggacgtccaggaccgtgtactccatggggtaaaccggcacttggtcttaagactcgtaagaagaacaaatcttctaacaagctgattgtaagaagaagagatggtaaagcgattaaataatcagattcacaaggaggttagaacctatggctcgctcacttaaaaaaggaccatttgcagacgaaagcttacttaaaaaagtagacgctatgaacgctgcaggtgataaaacagttataaagacatggtcacgccgttctacaatcttcccatcatttgtaggtcatacatttgccgtacatgatggaagaagacatgtgcctgtatatgttacagaggatatggtaggccacaagctcggtgagttcgttgcaacaagaacttacagaggacacggaaaagacgagaagaagtcaaaagttagataattttcatatattttgaaaggagggttcatccatggcaaaaggacatagatcccaaatcaaaagagaaagaaacgagcagagagatacaagaccttcagctaagatttcttacgcaagagtatctgttcagaaggcatgtttcgttcttgatgccatcagaggcaaggatgtacagacagcacttggtattttagcatacaatccaagatatgcttcaagcgttatagagaagttactgaaatcagcaatcgcaaatgctgagaataacaacggtatgagcgttgagaacctctacatcgaggaatgctacgcaaacaaaggaccgacaatgaagagaatcaaacctagagcacagggtagagcttacagaatcgagaagagaatgagccacatcacaatcgtgctcaatgagagataggaggacaatatgggacagaaagttaatcctcatggcctgagagttggcgttatcaaagactgggattccaaatggtacgcagaaaaagatttcgctgacaatctggttgaagaccacgagatcagaaagtttttaaagaagagattatacagcgctggaatctctaagattgaaatcgaaagagcatccgatcgcgttaagatcatcgtttatacagctaagcctggtgtcgtaatcggcaagggtggttccgagatcgaaaaggtgaaagcagagcttgcacagttcacagataagaagctcatcgttgacatcaaagaagttaagagaccggacaaagatgcacagcttgtagctgagaacattgctcagcagcttgagaaccgtatctccttcagacgtgctatgaaatcatgcatgtccagaactatgaaggctggagcactcggagttaagacttccgtatccggacgtcttggcggtgctgatatggctcgtacagagttctacagcgagggaacaattccgctgcagacacttcgtgctgacatcgattatggattcgcagaagctgatacaacttacggaaaagtcggtgtaaaggtttggatttacaaaggcgaagttcttccgactaaagcagataaggaagggagagatagataatgttaatgccaaaaagagtaaaacgtcgtaaacagttccgtggtactatgaaaggtaaggctcttagaggtaataagatttcttacggtgaatttggtatcgtagctatggaaccatgctggattcgttctaaccagatcgaggcagcccgtgttgctatgacacgttacatcaagcgtggtggtaaggtttggatcaaaatcttcccagataagccgatcacagcaaaaccggctgagactcgtatgggtagtggaaaaggtactgttgagtattgggcagcagtagttaaaccaggccgtgttatgtttgagattgcaggagtaccagaggaaatagctagagaggcacttcgacttgcaatgcataaattaccttgcaaatgcaaaatcgtttctcgcgcagacttagaaggcggtgataacagtgaaaattaatacatttgtaaacgagttaaaaggaaaatccgtagaggaattaaatgaagaattagtagctgctaagaaggaactctttaatctgagattccagaacgcaacaaatcagttggataatacaagcagaatcaaagaagtaagaaagaatatcgctcgtatccagactctgattacagaggctaaaagagcatagtgaaaggagcagcaaccgtggaagagagaaatttaagaaaaacccgtacgggtaaggttgtcagcgacaagatggacaaaacgattgttgttgctgttgaagaccatgtaaaacatccactttataacaagatcgtaaagagaacttacaagcttaaagctcatgacgagaacaacgagtgtaaagttggagatacagtaaaagttatggaaacaagaccgctgtccaaggacaagagatggagacttgtggaaatcatggagaaagcgaaataattatttgaaggaggtttacctgcatgatacagcaagaaagcagacttaaagtagcagacaacacaggtgcgaaagagttactgtgtatccgtgttcttggcggttctacaagaagatacgccaacatcggagatgtgatcgttgcaactgttaaagatgcaacaccaggcggcgttgttaaaaaaggtgatgtcgttaaagctgttgttgtccgttctgtaaaaggcgctcgtcgtaaagacggttcctatatcagattcgatgaaaatgctgctgttattataaaagacgatttgaacccacgtggaacacgtatttttggaccagtagcaagagagcttagagagaaacactttatgaagatcgtttctctggctccggaagtactgtaaggaggtgcctgagaatgtcaactatgaaaattaaaaaaggtgatatggttaaggttatcgccggaaaagataaagataaagaaggcaaagttattgccgtagataaaaaagacggaaaagtcctggttgaaggcgtcaatatgctgacaaagcacacaaagccaagcatggcaaaccagaacggcggaatcgtacatcaggaaggttacattgatgcatcaaacgttatgttacttcataacggaaaagcaacaagagtaggctttaagatggatggagacaaaaaagttcgttttgctaaggcaacaggcgaagttattgattaattcaaggaaggaggtccaggactttgagtagactgaaagagcagtatcagaatgagatcgttgatgcaatgatcaaaaaatttggatataaaaacatcatggaagtgccgaaacttgacaaggttgtaattaacatgggtgtcggtgaggcaaaagacaatgctaaacttctggagtcagctattgcagacatggagaaaatcgcaggacagaaagcggttgtaacaagagcaaagaattctgtagctaacttcaagatcagagagggtatgccgatcggatgtaaagttactttaagaggagagaaaatgtacgagttcgttgatcgtctgatcaacctctcacttcctcgtgtacgtgacttcagaggagtaaacccgaacgcatttgacggaagaggtaactatgcacttggaatcaaggagcagcttatcttcccggaaatcgagtacgataagattgacaaagtcagaggtatggatgtaatttttgttacaacagccaagactgatgaagaagcacgtgaattattgacacagttcaatatgccattcgcaaagtaaaaaggagagaaattcatggctaaaacatcaatgaaaatcaaacagcagcgtgcaccaaagttctccacaagagaatacagccgttgcagaatttgtggtcgtccgcatgcatatttaagaaaatacggtatctgccgtatctgcttccgcgaactggcttataaaggacagatcccgggtgttaaaaaagcaagctggtaagacgaaagcaactatatactgtgaaataacataggaggaatcacacacatgactatgagcgatccaattgcagatatgcttacaagaatccgtaatgcaaacactgcaaaacatgatacagtagatgtaccggcatcaaagatgaaacttgctatcgcaaacattcttgttgatgaaggatatatcgcaaaatatgaccttgtagaagatggagctttcaagacaattcacatcacactgaaatacggtgctgacaagaacgagaaagttatttccggactgaagagaatctccaaaccgggacttcgtgtttatgctaatacagaggatatcccgaaggtacttggcggactcggaacagcaatcatctctacaaacaaaggtgtagtaacagacaaagaagctagaaaactcggcgttggcggagaggttctttgcttcgtttggtaagccgaaagcaacttagtgagaacgaggcgtagccgaagtttgagcttagtgcgaggttgttctttgaacttagcgaggtcctttcgagcttagtgaaaagaacttccttataaatgtaactgaaaacagagaagccaacgcagcttctccgagaatctaagttaaggaggataatggtatgtcacgtataggaagactgcctgtagcaattcctgcaggagtaactgtagaagttgctgagaacaatgtagtgactgtaaaaggtcctaagggaactcttacaaaagagcttccagtagaaatggaaatcaaagttgaaggcgaagaagtaatcgttacaagaccgagcgacttaaagaaaatgaaatctcttcatggtctgacaagaacactgatcaacaacatggttgtaggtgtaacagagggatacgagaaagttcttgaggttaacggtgtaggttacagagctgctaaatcaggaaataaactgacactgaaccttggttattcccatccagttgagatgatcgatccagaaggaatcgagactgtacttgagggacagaacaagatcactgttaaaggtatcgataaagaaaaagttggacagtttgcggctgagatcagagataagagaagaccggagccatataagggcaagggaatcaaatatgctgatgaagtaatcagacgtaaagtcggtaagactggtaagaaataaataaggagagtgtgaaaatggttagtaagaaatctagaagcgaagttcgtagaaaaaaacacatgaaattacgcaaccgtttcagcggaacagcgcagagaccgcgtttagctgtattcagaagtaataatcatatgtatgcacagatcatcgacgatactgttggaaatactcttgtttccgcttccactcttcagaaagaagtgaaagcagagctcgagaagactaacgacgttgaagcagcagcataccttggaaaagtaattgccgagagagcaaaagctaaaggtattgatgaagttgtatttgatagaggcggattcatttaccagggtaaaatcaaggcattagcagacgcagcaagagaagctggtctgaatttctaaggaagggagaacacagatgagacaggaacgtattgatgctagtcagatggaattagtagaaaaagtggtatcaatcaagcgtgtaaccaaagttgttaaaggtggtcgtaacttccgtttcacagctttagtagttgttggtgatggaaatggccatgttggtgcaggtttaggaaaagctactgaaattccggaagctattcgtaaaggtaaagaggacgctatgaagaaaatgatcagcgtatctcttgatgaaaactcaagtgtaacacacgatgtgattggtaaattcggaagcgcttccgtacttcttaagaaggctccggaaggtactggtgttatcgccggaggaccggcgcgtgccgtaattgaggcggctggagttaagaacatccgtacaaaatctttaggatccaacaacaaacagaatgttgtacttgctacaatcgaaggacttaaagaagttaagactccggaagatgttgcaagacttcgtggcaaatcaattgaggagatcttaggctaatcaaccgagaagcccgatcaagcgcataggaggtaagattgaaatggcaaatttaaaagttacattagtaaagtctacaatcggcgccgtaccaaagcatagaaaaacagttgaggctcttggacttaagaaactcaacaaaacagttgtattgccagataatgcagctaccagaggtatggtacagcaggttagacatttagttaaagttgaagaagaggcttaattaagataaggaggtaatgtcatggacttatcaaacttaagaccggcagacggttcaaaacagagtgataatttcagaagaggccgtggtcatggttcaggaaacggtaagacagccggaaagggccacaaaggacagaaggctcgttcaggagctacaagacctggtttcgaaggcggtcagatgcctttatacagaagaattcctaagagaggtttcacatgcagaaactctaagacaatcgtaggaatcaaccttagcgcacttgaagtattcgaggatggcgctacagtatccgttgagacattgatcgaaagcggtattgttaagaatccaaaagacggagtaaaaattcttggaaatggagagttaactaagaagcttacagttcaggctaatgcattcagtgcaaaagcagctgagaagattgaagctcttggtggaaaagcagaggtgatctaatgcttaagtccttgcgtaaagcattaagtattgaggatatcagaaacagacttctctatacattggcaatgcttatcgttgttaggttgggatcacagttgcccactccgggagtagatccgacatttattcagaatttttttgcacagcagaccggtgacgcatttaacttttttgaggcgttcaccggcggctcatttacaagaatgtcagtatttgccctgagtatcactccatatatcacatcatctattattatacagcttctgacaatagcgattccaaagcttgaagagatgcagaaagatggtgaagatggaagaaagaaaatcgcagcgattacaagatatgtgacagttggtcttgcactgattgaatctatcgcaatggctgtaggatttggacgtcagggacttctggaagaatataatttcgtaaattgtgcaatcgttgtatgtacgcttacagctggtagtgcatttcttatgtggatcggtgagcgtattactgaaaagggagttggaaacggtatttctatcgtacttctgatcaacattgtttcccgtgttccggatgatttcgtggcactgtatacacagttcatgaaaggcaaaacaattgcaaaggcaggacttgccggtgttattatccttgcagttcttctggttgtagttgtgtttgttatcattcttcaggacggagaaagaagaattgcagttcagtattccaaaaaagtacagggaagaaaaatgtatggcggtcagtcaacacatattccgttgaaggtgaatacagccggagtaatcccggttatcttctcttcttcactgatgcagacaccaatcgtgattgcacagttccttggaaaaggaaatggaactggaattggaagtaagatccttgcaggtttaaactccaataactggtgtgatccagagaatccgatttattcagttggacttgtggtttacattttacttacaatattctttgcatatttctatacatcgattactttcaatccgatggagattgcaaataatatgaaaaagagcggtggatttatccctggaattcgtccgggcaaaccaacagttgactaccttacaaagattttgaattatatcatctttgttggtgcgtgtggtttgatcatcgtacaggtgattccatatttcttcaatggtgttttcggtgcaaacgtttcctttggtggaacatcacttatcattattgtaggtgttgtacttgagacaattaagaagattgaatcacagatgcttgtaagaaattacacaggatttttaaataataagagataacagttattgatattgttttctattaaatgtcttttagctcgctttgttctgtcctcaattgcaggacgaacagagcgggttaaacttgtataaggaggataaagatatgaaactcatcatgttaggagccccaggagcaggaaaaggaacacaggcaaagaagattgctgagaagtattctattccgcatatttctactggagatatctttagagcaaacatcaagaacggaacagaacttggtaagaaagcaaaaactttcatggatcagggtcttctggttccggatgagctggttgttgatcttgttgtagacagagtaaatcaggaagattgtaagaatggatatgtacttgatggatttccgcgtacaattccacaggcagaggcacttgatcgtgcacttgctgagatgggacagaagattgattatgcgatcgatgttgaagttccagatgagaatattgtaaaccgtatgtctggaagaagagcttgtgttgattgtggtgctacttatcatatcgtatatgctccgactgcaaaagaaggcatctgcgacaagtgtggcggagagcttatcttgagagacgatgataaaccagagacagtacttaagagacttggtgtttatcatgagcagacacagccgctgatcgattattatacagaagcaggagtactcagagaagttgatggtacaatcgatatcaacgatgtatttgctgcaatcgttcagattcttggagagtaagttttgttgatttcattcaggaggattaaaaatgtcaaaaactgacgtgattgaaattgaaggagttgtagttgagaaacttcctaacgcaatgttcaaagtagaacttgagaatggccatattgtactggcacatatcagcggtaagctgcgtatgaacttcatcaagattctgccgggagataaggttacacttgagatgtcaccttatgacctgagcaaaggaagaattgtctggagagacaagtaagaattctacacatcaaataacgggaatgttgttgtttacaacgttccgtatctgaaaagataaaaagatattattttctgaaaagtatttttagaaaataatatcttttttaatttaggtcttgactttaccatatattttgtggtaaagtatgaaatggtcatttttggagaggtgtgtccaaaaataccggaatatataggcagagcaaagtagggaaggaggatttgacatgaaggttagatcatcagttaaaccaatttgtgaaaaatgcaaaattattagaagaaaaggtagtatcagagtaatctgtgagaacccgaaacacaaacagcgccagggctaaggcattgaacacttgatgagtgcaagcgtaagcgtagcacgaatttagtgagaaagcctatcaggagacttggtgaggtattatcgaacctagtcgagtgatgctactgatgttttgtgcaattatcaagcggctgacagcatgacacgccaggaggtgtgtggagctgtttaatatacagtaaggatacatcgcatctgtccgcaggtaccgacagagcgtgtagtctgggcatctgacagacgtttgtcatctttatattaaagagggaagatgctattgtatattgcttataatacccggcatttgcattggcggatgagagtatgatccgtgccgggaaagggtatgtagtttccgtacatacctgggctgggatatcggaaggatacattccggtaggatgcagcagtagatgagttacaccagacttcatttattaaaatagaagatactcatttcgcattcgcagcctcaattagggacaatgaacaagaaaaccagaaaagaaaatggaggaaagacacatggctcgtattgcaggtgtagacttaccaagagacaaacgtgtagaaatcggtcttacttatatctacggaatcggtagaacaagcgcagaccgtatcttaaaagatgcaggagttaatcctgacactcgtgtaagagatcttacaagtgaagaagtaaagaaaatcagcgcagtgatcgatgagactcaggttgtagaaggtgatcttagaagagagatccagctcaacatcaagagactgaaagagatcggatgctaccgtggaatccgtcacagaaaaggacttccggtacgtggacagaagactaagactaatgcaagaacatgcaagggtcctaagagaactgtagcaaataagaagaaataataagaacgtataaaataaagaaagtaggttagtttaaatggctaagagagttgcgaaaaaagtaacaaaaaaacgtgtcaagaaaaacgttgaacgcggacaggcacatattcagtcatccttcaacaatacaattgttacactgactgacgctcagggaaatgctctttcatgggcaagtgcaggcggtctgggatttagaggttcaagaaaatctactccatatgcagcacagatggcagctgagacagcagctaaggcagcattagtacatggccttaagacagtagatgtattcgtaaaaggaccgggatcaggaagagaagcagcaatccgtgcacttcaggcatgcggaattgatgtagtaagcatcaaggacgtaacaccggtaccgcacaacggatgtcgtccaccgaaacgcagaagagtctaattatactctgctgtataagaaaagcagttatttaatagtaaatgttgacgcagcggcatgagtaccgctggcatgtataataattaggaggatagaaatggcagtaaatagagttcctgttcttaaaagatgccgttcattaggaatggatccgatttacctcggaatcaataagaaatctaacagacagttaaaaagagcaaacagaaagatgagcgagtatggtcttcagcttcgcgagaaacagaaagcaaaattcatctacggtgttcttgaaaaacctttcagaaactactatgcaaaggcaaaacagcaggaaggaatgacaggtgaaaaccttatgatcatccttgagtcaagacttgacaatgttgttttccgtcttggacttgctagaacaagaaaagaagctagacagatcgttgatcataagcacgttcttgtaaacggcaaacaggttaacatcccatcttaccttgtaaaggctggagatgttattgaaatcaaagagaacaaaaaaggttcacagagatacaaagagattcttgaagctacagctggaaacatggtaccagagtggcttgaggcagacgctgagaatcttagaggtacagtaaaagagcttcctaacagagaagcaatcgatgtaccggttgacgagatgcttatcgtcgagctgtattctaaataataattacgatttgaaaggattgcgcaggcatttatgcagggcaatcctaactaatctgaacaagttgtttagatacagttttgtaccccctcaacatatattaagcccataaggagggtctgtgtagtgtttgattttaataaaccgaatattgaaattacagatgtttcagatgacaagaaatacggaagatttgtcgtagaaccgctggagagaggatacggaactacgcttggtaacgcgctgagaagaatcatgctttcttccctgccgggagcagcaatcagttctgtgaaaatcgacggtgtactgcacgagttcagttccatcccgggtgttaaagaagatgtgacagagatcatcatgaacctgaaatctctggctatcaagaacacatctgagtctgatgaagtgaagacagcttatatcgagttcgaaggagaaggcgttgtaacaggtgctgatatccagtgcgactctgatattgagattgtaaacccggagcaggtaattgctacattaagcggtggcaaagacagcaagctttatatggaacttacaatcacaaaaggaagaggatatgtaagctcagataagaataagacagaagatatgccaatcggtgttcttccaatcgattctatctacacaccgatcgatcgtgtcaacctgacagttcaggatacacgtgtaggtcaggttacagattatgacaaactgacacttgatgtctggacaaaaggtacaatggctcctgatgaggctgtcagccttgcagcaaaagtgttaagtgagcatctgaaactcttcatcgacctgtcagaggtagctcagcaggcagaagttatgattgagaaagaggatgacgagaaagaaaaagttcttgagatgagcattgatgaacttgagctttctgttcgttcttacaattgtctgaagagagccggaatcaacacagttgaagagctcacaaacaagactccggaagacatgatgaaggttcgtaaccttggtcgtaagtctctcgaagaagttcttgcaaaactgaaagaactcaatctggaactgaaccacggagaagaataatattctttatccgtactatgataaagtatcaggacgcttaggtcctgcacaggctgaattcacagattgtgaatattagcccgctgaagattaaatatcctgatggtaagcccgaagagcacagcaggagcatttgattagtaagcccgaagacgcataaccaaatgttaattaatggaggaaatttgaaatggcaaagtatagaaaacttggcagaacagcaagccagagaaaagctttacttagaaaccaggtaacagcacttcttaacaacggaaagatcgttacaacagaagctaaggcaaaagagatccgtaagcaggcagaaagcctgatcgctcttgctgtaaaagaaaaagataacttcgaagaagttacagtaatggctaaagtagcacgtaaagacgctgatggaaaacgtgtgaaagaagttgttgacggtaagaaagttactgtttatgacgaagttgaaaagacaatcaagaaagataagccaagcagactgcacgctagacgtcagatgctgaaagttctcttcccggttaaagaaggcgagaagagaaacatgaaagatgttgacatggttgcaaaactctttgatgagatcgctccaaaatatgctgatcgtaacggtggttacacaagaatcgtaaagattggtcagcgtaaaggtgacgcagctatggaagttctgatcgagcttgtttaatttgataatatagctgatttttgactcctatgtgagatgtatgtcttacataggagttttttgtatattaggaaagtgctttcctaatatctttacaactgtgcaagtcaagagattaccgaaaaaatctttggatgtatgggggaaatttttgatgaggtgaaactcaaaaataaattacccaatttcaaaatatattacgattgccggaaaagaaagtttaagtgataatggtggcaagatattcataaagaaatcacatttacacaacacagggatgataaggagcgaacactatgaaaaagaaacaggcaatcgcattattacttgcaacagtacttgccggtacaggtactgtaccatatgcatttgtgtcaactgtgtatgcaggacaaggaaatgcaccggatgcaccgacaaatctcaagacagagatgcttaatgaagcatatggtattgatacgaaagacccggctttctcatgggtagtcaatgacaaagatcaaaaagaagtacagacagcttatcgtattattatttcagaaacatcagaactgaaaggtgaggtgcttgatacaggctgggtggaatcggacgagaacagttatgcacatgcagagggtctgtcagataagctgcaggataatgaactttattactggcaggtgcagacaaaagataaagatggaaatgagagcccgttatcagaagcttgtccatttatgacaaatgtatcaggagaatggcagagtctgaatggaatttgggcaacaccgaatgcaactccggagtcaggagaagaagagaaagatccaagtctatggacagactttacattggaacagaagatgtccatcaaagaaggtggagcatttgcaatgcttgtcagaatggatgacgctggaaagaatggttatatggttcaattccgttcaaatgataatcagattaagattcatcagattgataatggcacaattaatacaaatgcatttcaggtaatcaatttagctgaatcagaaataacattaccagaagatggaagtgaatttggcgtaaggattgatttcaaaggaataaggatgacattttctattcttacagatttgcagagtgaagatgcacagtatgtagaagttgggtctgctgaagtagatggtggtcgtacagatggaagaatcggatatcgtaccggaagaacagaagctggaacaatagatgatttggtaattacatcaacagatgaagcaaagacagttttgtattcttcagattttgagtcagatgataagcttttctcaggtctgtctgttgtagatggcaaattaaatgtaggaaagtcagtgtacagtgtatggtccggtgatacaacaaagccatatacaggagagacaactccggaagagtcagataaagaagatgagaatctcttaacagaaatctcaagatattcttttttccgtagtccaaagcttacaattgaaaatactgataacattgataaggcaattgtaagtacggcaagccgtggaacagcaaaggacagaggcacgatttatgatatattcatgaacggaacctgccttggggccggatcagcaagagagatgtctaatgtaggtaaatacagcaccggaagtggatatactcaagtttattataattcttatgatgtgacagaacttcttacaaacggagatgctaatgtaatcagtgctgttggaaattcaagagatgacagtcgaagtattttggtgcagatgacggtattttataaggatggaacaaaacaggttctgactaatagtggtgttgaaaattcaggatggaagacacttgatggaacaaatgcgtttggcgatgacggcagcggtatcggaacaggatatgtaacacttttacatgataatattaatgctgagaaatatccggcaggatggcagaatgcagactatgatgatagtaaatgggcgtcagcagtgattaagaatcaggtggctgattcagcaacaggaacgagtggaagagttctttatccatatacatcagagaatgtgcttcgtgagactacgaaggaagcaaccaagaaggtatatatcaataaatcaggaaatgtagttgtagatcttggaaaagagattatcggtggtatgaaagtcaacatcgagagtgacgcaaagcagtctgttacagttcatatgggagaagagatgaatggtgataacgtaaaataccagttatctgcaaaacctgtttatgaagatacatggacattaaaagaaggcacaaacgaatttgagaccgctacaatgcgtaatttccgttatgtcgagctgattggtctggatgatgtaacaaagcaggcaattgtggacaatccagacagcatcatgggatgggcgatcaaacaagaatttgatcaagaggattcaagcttcaaggcaacagacggttcagatgcagcaacattgttaaatcgtctgtgggaactttcaaagtattcgattgaagcaacaaatcaggatgtgtttactgattcacaagcccgtgagcgtgctccttatgaaggcgatttattggttaattcaagcacaagttatgcagtgtctgaaaattattcattggcaagacattctaacgaatggctgatcgataatcagacctggccaaatgattacagaattttttctgtagagatgtcttatctcgattatatgtatacaggaaacaaagattctatttcggagtactacacaggacttaagaaaaaactgacagaagaagtggaatatgaagattctgcaacaggattgatacgggcaaatggaagtcaggcaggtaatacatctttgattgactggccaacatccgaaagagatggataccagggaagttattatgatgtggtattcaatgcagagtatgttggaatctatcttaagatggcggatattagtacagcacttggaaagacagatgatgcaaaatactacactgagaaatcagagaagctcaaagaaagtcttctgaaatatgcatatgataaggaaaacggatgcttctacgattctcttgcaaaggattatgcagcaacaaagcattcttccacccatgcaactgcttatgcattgacttatggtgtgtttgacagccaggaaatggcagatcagatgtgtgatttcgtatatgaaaagtgcaaggatgaatttaaaggaagcgtttatgtgacgtactttattctgaagggcttgtataatggaaatcatggagattatgcagaaaagctgatgacgaatcaaaaagtcggaacggatgtaaagacatttgcctctcttctggatgatttgaactgtacgatcacaccggaggcatggggacacaagtggaaaggaaacatgacaatgtctcatccgtggggtgctgcaccaggctgctctattgtacagggaacttttggtattatgccgatagatgcaggatttgatgaatttacgatcaagttccagccaggtgaagttgcatctgcagaagtgacaacaccgagtgtgaagggagagattcaggcatcctatgcaaatggaacagctgacgatattgaaaacctgaagatgacagccagcgttacgattccagtaaatacaaaagcaaaggtttctcttccggttccaagtgcaagatatacaacaatgtgtgtaaatggagagaaagtaaaaggaactaacgacgggacttacctgacggtagaacttggatcaggaacttatgatttgtctctcagtgatgagaaagaagatgcagaagtgactctgactggtaaagtatccgcagatacaacagaattaattcttggaaagacagcacagattaagaccaccgtaaaggatcagtttggtgaaaagtatacagaagcaaaaggactgaaattaacctatacaagttctgacgaaacagtagctactgtagatgagaagggtgttgttacaccagtgaaagccggaacagcgaccgtaactgtaacagcagagtacaacggaactaagacagaaatcggtacattggactttaatgtagtcaaagtactgaaaggtacagaagtaaaagtcaagacagataaagaaaaactggaagttggagatactgcacaggttgttcttgtgaatgtttacgatgacggatcagaagaggaagtaagtctggctggtgcaaccttcagtgtagaaggagaaggcgcaacaattgatgaatctggcaatctgacaattacaggagccggtgaatttaagatcaatgtatcaactacaacagaatttgaggatgcaacaaaagagacaggaacagaaaaccttacttatgacacgatctggagttttgatggacagagtagtccgctaagtggagttaatctgaaagatgggaagatttatgcagcaaaaggacagaaagttgtcaatacagacgaagacaagaagggaaatgtagtcagcggaacatttacaattgaaaatattgctgccaatatcgcattcaatgtacaggatggaagtcatcagtacttctggcagttccgttcggacagcaagacattaaagaagcatacacagattggtaataacattgctgtttatggtgcagaggttccgattgttctgaatgatggggaaaatacattccttattgcaacggtaggagacaagatttacacttacctgaatgatgaactgattgatgtgtgcgatgtaaataaagaactgccgacaagcggtggattcggaatccgtaacggtgggtctgagagctcttatatcagtaatcttaatgtaggaagcaatctgaaatacacagtgagtacaactgtaacagcagaagaaaaagtccaggtaaataagaacttcctgaataagacaatcgagtatgcaaaacagcagaaagagtctgaggagttcaataatgcaattgtagatgtacaaaagtctttcagcgaagcactggagaaagcagaaacagtcgcagcggataaaaatgcaacacaggaagaggttgatgcagtatggcagaaactactcacggaagtacataagcttggaatgatcaaaggagatattacttctcttgaaaaacttgttgatgttgcggaagcaattgatcttgataaatatgtagaagttggtcaggtagaatttaaagatgcactcaaagcagcacaagatctgattgcagataaagataatgcaatgcagaaagaaatcacagaaacagaagacaatctactctcagccatgctgaatctgagatttaaagcagataagtcaatcctgaagagtctgatcgaagatgcagagacgaaagaagaatcagcatatacagcagagagttatacagtgatggctttagcactgaatgatgcaaaagttgtaatagagaacgaaaacgcaacgcaggaagaggttgatgaagcagcagcaacactgaagagtgcgattgacggtctggttgttgtcaaggatgacaagaaagatgacaacaaagatgatggcaccaaaggcgatgatagcaaagatgacagcactaaaggagacgacaacaaggataattcagccggtgaatccaaagatcagaacaacagtcagagtggaagtgacaagaaggaaacgacagcaaagaatagagcttccaagacaggtgacatgacaagtcttctgttcccggcactgatgcttacagcgagtgcaggagcaatcggtggagtagcggttcagcgtaagaaaaaaggaaacaaaagagaaaacagtaaaaaataataaaagataacgagatataacgttagattttacgacagactgtcgggcaggatggaagagaaatttccactgtccggcagtctttttgtcaagttaaaattcagttttgtaaaaagtgcacaaatgatgttaaaaaaataacgttaaaactttaacaacaggcacattgacaattaattaacgaactggtatactaataactgtaatcgggaaacataaaaacaacccgatcggataaaacttgcaggttacgaaaacagtgactataaaaatgatttattcaagtacaggaggaatactcagatggcaaagaaagaagcggcaaaaactgtagagacaaagacagtaaacaccggattcgttgataacgttgaagctcttgaagcaaaaatgaaagagatgcgcgaggcacagaaaatcttcgctacatttacacaggagcaggttgacaaaatcttctatgaagcagctatggcagcaaacaagcagcgtatcccgcttgcaagacttgcagtagaagagactcagagaggtattctcgaggataaggttatcaaaaaccattacgcagcagagtatatttacaacgcatacaaagatacaaagacatgtggtgttgtagaagaagataaggcattcggaatcaaaaagatcgcagagccaatcggacttgttgcagcagttatccctacaacaaacccaacatcaacagcaatctttaaaacactgatctgcttaaagacaagaaatgcaatcatcatcagcccacatccggctgctaaagcatctacaatcgcagcagctaaagttgttcttgatgcagcagtgaaagcaggagctccggaaggaatcatcggttggatcgatgctccatcactggaacttacaaacacagtaatgagagatgcagatatcatccttgcaacaggtggtcctggaatggttaaagcagcttactcttcaggaaagccggcactcggagttggagctggtaacacaccggttatcatcgacgatacagcagatgtaagaatggcagttaactcaatcatccactctaagacatttgataatggtatgatctgtgcttctgagcagtctgtgacagtacttgaaagcgtatatgaggaagctaagaaagaattccagtacagaggatgctacttcctgaaaccaggtgaggagcttgacaaagttcgtaagacaatcatcatcaacggtgcgctgaatagcaagatcccaggaaaatcagcttatgaaatcgctcagatggcaggcgttgatgtaccgaagaatacaaagatcttgatcggagaagttgaatctgtagatatttcagaagaatttgcacatgagaaattatcaccggtacttggtatgtacaaagctaaaacatttgatgaggctcttgagaaagcagctcagcttgtagcagacggtggatatggacatacatcttcactctacgtacatccggcagagacagagaaaatcgcaaaacatgcagcagcaatgaagacttgccgtgtactgatcaacacaccttcttctcacggtggaatcggagacctttataacttcaagatggctccgtcccttacacttggatgtggatcatggggtggaaactctgtatcagagaacgtaggagtaaaacatctgcttaacattaagacagttgcagagaggagagaaaatatgctgtggttcagaacacctgagaaagtttacttcaagaaaggttctatgccggttgcactggatgagcttggaacagtaatgcataagaagaaagcatttatcgtaacagactccttcctttacaagaacggatatgtaaaaccgatcgaagataaattagatgaaatgggaatccagcatacatgcttcttcgaagtagcaccagacccgacacttcagtgtgcacgcaagggtgttgaccagatgagacagttcgagccagatacaatcatcgctcttggtggtggatctgcaatggacgcaggtaagatcatgtggatcatgtatgagcatccggaagcaaacttcgaagatatggctatggacttcatggacatccgtaagagagtatttacattccctaagatgggagagaaagcttacttcgtagctatcccaacatcttcaggaacaggttctgaggtaacaccattcgcaatcatcacagacgctgacacaggtgttaaatggccaatcgctgactacgctctgcttccaaacatggcaatcgtagacgtagacaacatgatgacacagccgaagggactgacaagtgcttcaggtatcgacgttatgacacatgcaatcgaggcatatgtatctattatggctacagattacacagatggtcttgctatgaaggctgttaagcttgtattcgagaaccttccatctgcatacgagaacggagcaaacgatccgaaggctcgtgaagagatggcaaacgcttcctgtatggctggtatggcattcgcaaatgcattccttggtgttaaccactccatggctcataagcttggtgctttccaccatctgccacacggtgttgctaacgcagtaatccttacagaggttatgagatacaatgcagcagaggttccgacaaagatgggaacattctcacagtatcagtacccacatgcacttgcaagatacgcagaactcggacgtttcgcaggatgcacaggtaaagatgacaaagaagtatttgagaacttcatcgctaaacttgaagaactcaaagagaagatcggaatcaagaagacaatcaaagattacggcattgatgagaagtacttccttgacacacttgatgaaatgtcagagcaggcattcaacgatcagtgtacaggagctaacccaagatacccactcatccaggagatcaaagatctgtacctgaaatgctactacggaaaataaatcgcattgcataagcaggcatatgaccgttagaatctaaaatatacgaagagagacagaatgaggttgaaaagcattgttctgtctcttttttacgtgagcaacgagccaaagtctgtgcttgcacaagaccttggcgactgccgcgataacttggaaaatacagtttttgagttttccaagtatacgtgagcaacgagctaaagcttatgattgttaataaatagacaatatataagaggtaaaaaatcatgttaaaaactgcacaaacttgctctgaaggggttttatttctaaaaattgtgagatataatgacatcatcaaaacaaagtaagagccgtaaggcaaaaggaacagccccgcagagctgagataaaataagagcagacaagaaggagcgttcaagatataaggaggtctatattatgaagttagaagaaaaaaatctcatcgtgaaacgtgcttacaaatcagtctataaatgtgatgattgtatcgtgaaagtttttaatgaaggacatccgaagtcagatgtatttaatgaggctctgaatactgcaagagtagaagagacaggtctggacattccgaaggtaaaagaagtaactcagattgatggaaagtgggcaattgctattgagtacaaagcaggtaagacacttgaggacatgatggaatctgatatgaagaatctggaaaaatatatggaagactttgttgatctccagttacaggttcagagtaagaaatcaccgcttctgaaaggaatgaaagataaattagctcgtcagatcaatggattgaaagatcttgatgcgactacacgttatgaacttctgacaagacttgagagtatgccaaagcataataaagtatgtcacggagactttaatccgagtaatgtgatcgtaggaaagaatggaaagatgactgtggttgactgggctcatgcaacacagggaaatgcaagtgcagatgcagcaatgacatatttgcttttcgcactgaaagatcagaaagtagcagatctctatctgaaattgttctgcaagaagagtgatacagcaatgcagtatgtacagcagtggcttccgattgtggcagcagcacagttatctaaagaaaatgaacttgaaaaagattttctgatgagatggattgatgttgttgattatcagtagaaaatagagttgtttctaaaaaagaagcgctggaagatgaaaatgaaatcttccggcgcttcttaatcttctttttattattttaccaacttgtaaagaaaacgttatcgccaattacaacaccggttctgcttgtcgatggtgcgtacaggaagtaataacagtcggctacggcagcaagacgagctccgttgatcgcatcctgtgcaacctggatagaaagacttcgtggaccttgctttaatacacggtctaaggaacctgtccatacaggagcaaactgtccttgggcatagatgacatcatgaatagaattcggaaagcgactgctatatacacgattcataatgactgtagcaactgcaagcatagagtcgtaatcatagtgggcctcacattgcaggattgctgcaagaagtgtaaggtcatcagacgcaatggcagatccggaactattggagccaccagaagaacttgaacttccggaggatgaggaacctgaattgccggagttcccagaggaactggaagtattcgctttgttcgcactggcagcagcctcagcttttgcagctgcttcggctttcgcagcggcttccgcctgtttcctggcttcttctgcctgacgagctgcctcttcttctttggctttctgcagttttgcattcacctcattcaaattagtagaagttgcagcagcttttgcctgtaattgtgtctgctgtgtctgcaattggttctgtaaatctttcatggaagcctgctgtgcttccaggtctgctttctgatcggcaatctgctggtgaacatctttcagatcgttcagagctttgcggtcgtagttacttaaattttcaataaaatcagctttgtttagaaaatctgacatattttctgctgagaaaagcatctcaagcattgtagcacttccgtgctcatacatatatttgatacggcttttcatatcttcatactgctgatcttcgtttttctgcgctttctcaagatcatcctgtgttttgtctatatcactgttgaggatctcaacctgcatctcagtatcagatatcttctcactcagggtgaggatatcctggttgatgccttttaattcgttctcaagggcagaggtctggttttgcagattgtctatcgtgtctgtagcatagacaggaagtgcagaaaatacaattgcaagggaacaaatgagcgcggtgcccgtatgtaacttgctttttttgtaaaatgccataatctcaatatcctttctttaaatgacattgcatagttgttgaaaacctattatactataaaacagagaattaatcaaattggcacgaaatattttatgattgttttacaaaataattaaaaagatattgctttttgtaacaattgacagatagaaaatacagaagataaggaaaaaagtatgaaaaaaaaggaaattaagattgttggattagatctcgatggaacacttcttacagataagaaggaacttcttccttatacgaagaatgtgatcagagaggcactgcagaatggtacagttgttcttgttgcaaccggaagaccatggacaggagttccggaagaattacgtgagcttccggggatggattatgcactgactgcgaatggggcaaggattatcgagacgagaaccggaaaggtactggaagaacatctgttatccaaagaagtagcaaaaaaagcaattgcaatcggaagaaaatatgatactctgttggaagtttattttgatgggcagggatatgctcagaaagatgagatcgcgcaggtgagaaagtatcataagaatccgaacatgtgggattattttctgagaacacgaatagcggtagacagcctggaagatctgctggatgaaaaagaagggaatcttgataaagtacagatgttgtttgcagatatggaagagagagaagaggcatggaaagagctggagcgagaaggcgtctttgaactggttggctctcttcaatataatatagaaatcaatgcagttggtgtaaataagggaaccggacttgtgaatcttggcaagatgcttggaatcaggcgggaagagatcatggcgtgtggggatggcgataatgatatcgcaatgctcaaggaagttggatttggggttgccatggcgaatgccgaagaaaaggtcaaagctgtagctgattatattacggagagcaacaatgatgagggggttgcaaaggccatcgagaagtttgttctgaaatgaggaggggaatcatgttagaagtattaaaggttatcattttaggaattgtgcagggaatcacagagtggcttccaatcagtagtacaggtcatctgattctggtagagcagctgatccaactgaagcagagcgaggcatttacgaatatgttcaatgtggtgattcagtttggatcgatcctggcagttgtagtaatttattttcataagttaaatccgttctcaccgacgaagacggaaaagcagaagaagatgacaattcagttatggattaaagtagtgatcggaacaattccggcactgatcggaggagtgttgctgaacaatctgattgaatcaaaactgagtaatgcatatgttgttgcattgatgttgattgtttatggtattttattcattgtaattgaaaaacgtaatgagacaagagaaccgaaagtaaaaagaatctctcagctttctgtgaagacagttcttctgatcggagttttccagatgatggcgatgatccctgggacgtccagatccggcgcaacgattgtcggagcactggcacttggggtttcaagaagtgttgcagcagagtttacatttttccttgcaattccggttatgtttggagcaagtgcactgaagttgtttaagttcggtctggcatttaccccaatgcaggtatttctgcttcttcttggaatgatcgtatcctttgcagtatctgttatagcgatcaagttcctgatgaaatatatcaagaaccatgactttaaggcatttggatattacagaatcgtacttggaatcgttgtatttttattcttcggtatccaggctttattcaaataagatatgtattattgaatagagtgcagtgtgttttactgttcacagttattgtgaacagtaaaattttgtatttccaaaagaaatcgtgcataattacgtcttgcattttatgaaaagcatgttataattattaacatgttttgaatttttatgcagaaaaaagaggaggagcttaagatgaagaagtttttatcagtatttcttactgcagcattagcagtcagcatgctggcaggttgtggtagtaagaacgaaacagtaacagcaaaggtaatcgatattgaccttacaaatgaagaatatgcatttggtgtggacaagaatcagccggaacttcttgagaagacaaatgagtttattgcaaagatcaaatcagatggaacacttgatgagatctgcaaaaaatatttctcagacggagagccggaagcagtaaaatcagcaacacttgatacatctaaggatcagttggttgtagctacaaatgcagcattcgagccatttgagtatacaaagggtgaagattattatggaatcgatatggagatcgcaaagcttcttgctgatgaacttggaaaagaacttgtaatcgagaacatggattttgatgcagtttgtctgtctgtaagccagcagaaatgtgatattgctatggcaggacttacaatcaatgaagagagagaagaatatgttacatttacagattcttactattcagcatcccagcgtttgatcgttccaagcaatgttacaacattcgatgattgcaagacagcagatgacgttgcagctaagcttgctgagacaaaatcatctgaccagattggtgttcagcagggaacaacaggtcagtactatgttgaaggaagcgaagattgggacttcccgggacttccggcaaaatgtgtgacatacaagagcggatcacttgcagtacaggatatgctcaatggaaatattcagtatgtgatcattgatgcagcaccggcagcagcaatcacagatgcaatcaacgcagttcagtaagagtatttactaagaatttacaggcagtaaaataacagaatttattaacgagggaaatacaggcagaagatgatgcatgcattttcctctttttggagaaaggaaacaaatggggaattttagtcagaaagtagacaaatttattgatatatttctgaatcagaatggctatgtgaaagtagttcagggactgcacaatactttgctgatcgcaatctgcggtctgattatcggtattgtgattggtactttgatcgctacagtccgtgtgattccgaaatataaaactcttccgagagtattgaatcatatttgcagcttttacgttgcattattcagaggaactcctatggtagttcagctccttatcttttattatgtactccttccgatttttggggtgaagattaccggagtacaggtttctatggttgtatttggtctgaatagtggtgcatatatttcagagatcatgcgaagcggaatccagtctgtcgatccgggacagatggaagccggaagagcagtcggactcagttttggaacaagtatgatgaagattgtgattccgcaggctgtaaagaacattcttccgacacttggaaatgagttcatttctcttattaaagagacatctgtagtaagttttgttggcgcagctgacctttatgttgcatttaactatatcggaagtaacagctacgaattcatggtaccgtaccttgtaatggcgttaatctacatagcacttgtgcttgtgatcacattacttgttaaattattagaaaggagcctgaagaagagtgatagacgtaattaatctgcaaaaaagctttggggacaaagagattctgaagggaatcaatgttacgatcaataaaggcgatatcgttgcggtgctcggaccatccggctctggtaaaagtacatttttacgatgcttgaactgtatggaagacccgacaggcggaagtattatcttcaatggtgttgatatcgcagatatgaaggttgatattaatcagcatcgccgccatatgggaatggttttccagcatttcaatctttataataataagacagttcttcagaatgtcatgatggcacctgcatatctaaaatgtaaggacattgataaggcaaagaaaaagaatcgtatgatcaaatttaaaaatatgttccgtggaagtgacaagaaggaagaactgattccgatcactgagacaaaggagcagatcaagaaagaagtaaaggagcaggcaatggctcttttgaagagaatcggattggaagataaagcggatgtgtatccgtctacactttccggtggacagaaacagcgtgtcgcgattatccgttccatggctatgaatcctgatgtaattctttttgatgagccgacttcagcacttgatccggaaatggtaggagaagtacttgaactgatgaaagatctggcaaaagagggaatgacaatggttgttgttactcatgagatgggatttgcccgtgaggttgcttcaagagttcttttcattgatgacggtcagattaaggaagaagctgccccggcagaattctttgaacatccgaaagatccaagacttcaggagttcctttcaaagatcctgtaaaagaaaatgcgtagcattttggaggttggctctgaacagttacgaaaaaatatttaattttaatctatagaatatctgtttggtattgtgttacaatattgaacagatatttttatatattagaaaatattatttatattagaaaagtcatataaggaaatcgtattgaatgaaatgtaatgaaaaggaaaattgcaaagtagaatttggggaatgtgagagattacatgatatggtagaaccacttgttgaatggtttcgggagaatcagagagatcttccgtggcggaagcatgtgaatgcgtatcgggtctggatttcagagattatgctgcagcagacgagagtggaagcagttaaatcttattacacacgattcctggaagaactgccggatatcaaagcgctggctgaagtgccggaagacagactgcttaagctgtgggaaggacttggctactacaacagggcgaggaatttaaagacagcagcacaacaggtaatgaaagaatataatggtgtattcccggatacatttgaagagataaaaaagttgaagggaattggcagttatacagccggtgcgattagctcttttgtttatcatcagcagaaaccagcggtagatggcaatgtttttcgcgtggttacgagaattctggaagacagtgatgacattatgaaagcaagtacaaggacaaagatagaacgtatgcttgaacaggtgattccggcagaggcaccgggagattttaatcaaggattgatcgaacttggggcaatcgtctgtctgccaaatggagaaccaaggtgtgagagctgtccgataaggaaattttgtcttgcataccaggatgaatgtcagatggactatccggtcaagaaaaaggcgaaagagcgaagaatcgagaaaagaacgattctaagattttgtgataatgaggaaattgcgattcgcaaaaggccgggaaaaggactccttgcaggattgtatgaatttcctaatgtagagggacatttaacacaaaaagaagttatagaatatgcaaaagagtcaggtcttacgccggtgcgcgtgaagaagctgccaaaggcgaagcacattttcagtcatgtggaatggcatatgaccggatatgagattttggtggatgagttggaaaaagaatttcagaatcctgagatcatatttgcaggaaagaaggatctggagaaaaattatgcaattccgagtgcattttctgcatatctataaatgaagaggatgagaatactgtggtagctgaaaaatctggaaaataaaaatagaacgcttaaaatagagtccactctgttttattgaaaaaaagggcgaaatatgttataatatctcttatagtttaaaatgcatacgggagagttttagcagaaatgagtacaaaaatagaattatcgaagcagcagaaaaaatcacaggaaacaaaggaaaaaatctttcaggcagcgaagaagattcttcagaagagcggatatgaaaaattgtcaatcaagaatatctgtgaagaagcaggagtgtcgaacggaagtttctatcatcactttaagacaaaagatgatttgctgtcttattatatagaagaccagcctacgatgggaccggatctgctggagacaccgaaaagtctggaagatgtaaaggacggaattgtccgtgtttatttgaattatgtagcttattgccgtgagcttggtgtagaatttatggcagggtattatgatacaaagaatcaggcattgaatccggcgataagaacagaacgtccatatccgatcgtgacagtgcaggcttatgtagagcaggctgcgaaggatgggattattaacattagagagagtattgacgaatttacaacagatatccggatgatcgtgatcggaaatgtatttgaatggtgtctgagagagggaaatgctgatttcgagggcaacatgagtcgttctttaaggcggtatctggacagtacactggaggaaggttgatgatttatcactttattgtgaatccgcgggctcgttcagggcttggcgagatgctgtggaaacagctggaacctgagttgtgcagaaaaagaatcgattatcagattcatctgacaacaaagaaaaaggatgcaggaaagattgcatcagagattacggaagatggccaggagcacatgcttgttgttcttggaggcgacggtacactcaatgaagtactaagcggaattaaatcactggagaaagtgacgttgggatatattccgattggatcaagcaatgattttgcaagaggaacaggaattccgggagatccttttgaagcattggacacaattctttcacccaaaagggttgaaaagatggatataggtgtgctaaaaagggaagggaaaggaagaagatttgcagtgagtgccggcattggatttgatgctgcagtttgtcatgaagtatgtgtttcaaaatggaaacgtgtattgaaccttctgaaaatcggtaagctgagttatgcggttgtggcaatgaatcgtattataaaggatcggccggtgaaacttgaactgacactggatgatggaagcatgaaagtgtttgagaggacttattttgcagcatttatgaatcttccttatgaaggaggaggctttaagttttgtccggacgcttccggaagtgatggatttcttgatattatggttgtgtcggatctgtcgaagctcaagattctgtgtctgcttccgaccgctttttcaggaaagcatacaagatttaaaggggtgacgatattaaaatgtcgtagtgtaaaggtagtgacagatcgtgcactgccgttacatacagatggagaaccttcctttttatcaaaagagatagaagtctcactggaaaaagaaaaacttaatgtgatcgttgaatagaagaaaggtgatgaaacaggatgcatatagggattgttttagcaattgggttatgtattgtaataggaataccagctttcttaatttttttgctggctccaagactgtcgggcagaaaaagagtgcatccgtttcttggcgtaaagtgggcgcatagaggacttcatgataagaagcgtgggattccggaaaattcatttccggcatttcgtgcggcaatcgaagccggagatggaatagaactggatgttcatctgacaaaggatggacagttggtggtttttcatgatgatacatttgaaagaatctgtggaagacggggcagagtggaagatacttcatatgaagagatgcagaagtatagacttgcggagacaaaagagcggattccactattgtcagaagtactgcagttggtagatggaaaggtaccacttctgatcgaggtgaaacttcctaacacagatacaaagatttgcagaaaattggatgaagaactgcgaaaatatcatggcgaatacatgatccaatcctttaacagcctggtacttcgttggatgaagaaatatcggaatgaaatcccaagaggacaattatctgagaatctgacgaaaaacgacagaacaacgcattatctcttgagattttgtgtaaaatatcttttgagtaactgtatgtgcagaccggattttatttcttaccggtggtcggacagaaagaatccgggattatggttgaacagggttctctttaaaacgccggcagcggcatggacactgcatggagaaaaggatgttaaggcggcaagaagaagcttcgatatgtatatttttgagatgagttaaagaagagtaaatctgatttctattgaaagtgctgatttaaaaagtaaaggtgaacaaaagaagagacagatgttgataattcataagaaaaagaaaagaaatgttaaaaacttatgaagtcggttgagattgtgttttaaaagtgctataatcgagcctatcaaaaaagagcgttaaatgaaaatagcgcagaagtagcaagtgctgtatcggtttgatgaaaagcggaggagtgtcagatatgaaatggaagacaaagttcatagagacaataaaaagatataagcatgcatgggtgtttttatacgcgttaatctatatgccgtggtttttgtttcttgagaaacatgtgacgatgaattatcatgtggtgcagacagcattagatgaagagattccttttattgaatattttattgtaccgtatatgttatggtttgtatttatcgcagctacatttttatactttttcgttacagatgtacagggattttacaaactggcgaagatttcgtttgcaggaatgacaattttccttattatttgttccgtatttccgaatggtcaggatttacgaccggttgtgtttgagcgggataatatttttgtagatgcagttcgaatgctgtatcggacagatacttgtacgaatgtatttccaagtcttcatgtgtttaatactctgtgcgcatgtattgcaatccataagagtcaggcacttaagaaacacaaagctgtttgtattggagcatatgtgcttggagcgttgatcataatggcgactatgttcttgaagcagcattctgtacttgatgtgacaggagcatttattatggcttatctgttgtatcagtgggtatatgcagaagagacgaagaaagttccgggatattcaaagcgtccggtatttcagaataagtaagagttagaaaaagaattacaggaagtgcttttggctgatgaggtcaagggcacttttttgtatattaggaaagtcctttcctaatatacagaagtttctatagaaaagcatctggggaaatgttataataaaagccagtgaattactgtgggcagattagcctgacagttacgaataaagtattacatgagatttaggaggactagagcatgaagaaggttatgcttactggtgacagaccgacaggaagattacacgtaggacattatgtgggttccctgcgtcgtcgtgttgaattacagaatacaggagattttgatgacatttttattatgatcgcagatgcacaggcattgactgataatgctgataacccggaaaaggtacgtcagaatattatcgaagtagcattagactacatggcttgtggattggatccggagaagtctactctgtttatccagtcacaggtaccggaactgacagagttatcattctattacatgaatcttgtgacagtctcaagactgcagagaaatcctactgtaaagaatgagatcaagatgagaaattttgaggcaagtatcccggttggattcttcacatatccgatcagtcaggcagcagatattacagcattcaaggctactgttgtaccggtaggagaagatcagctcccgatgcttgagcagacaaaggagattgtacacaaatttaattccgtttatggagataccctgatcgatccgaagattcttcttccggagaatgaagcatgccttcgtctcccgggaattgacggtaaggcgaagatgagtaagtctctgggcaactgtatttatctgtcagaggaatcagaagatattaagaagaaagtattcagcatgtttactgatccgaatcatatccgtgtggaagatccgggaagtctggaaggaaatactgtattcacatatctggatgcattctgtaaaccagagtattttgcggaattcctgccagaatatcagaatctggatgagctgaaagcacattatcagagaggcggacttggagatatgaaagtgaagagattcctgaacaatgttcttcaggcagaactggagccaatccgcaacagaagaaaagaacttcagaaagacattcctgcaatctacgagattcttaaaaagggaagcgagaaggcagaggctgttgcagcacagacattgaaggaagtaaaagatgctatgaagatcaattattttgatgacaaggcactgattgaggcgcaggcagagagattttcaaaatagagtgttgttggaatagttataatgtagttttgaatcaggacaggcggtgcaaatttgagtttgcttatatgtgaacttgaatctggcaccgcctttgcttggttttgggtaaatttttgggcgtctgttcggagaggatcctttgaagtgagattttccaaagatacaaaaagactgtaaggaaatttccttacagtctctatagcgtgcgatagaagattcgaactcccggccttctgatccgtagtcagacgctctatccagctgagctaatcgcacattttgttgtttgctctgttgtatcgctcacaacaaaaaagattatataacggatattggaaaatgtcaacactaattttgaatttttttcaaaaaaatttgaagcggattttagaagctgttttcaatctatcttttgtacgctaccgagtgttattcttcaataatctgaatctccagatagtcaaagtcaatctcatcgacaaaattgtcctgatagaaacgcgctttggcgtggcgcttgaactcattgatcgttgagtcgagccagattggcttgctcagatcaaattcatagcagatcttatcgagtgcatgaaagatcttatgtgtacgtgtgtcgtctgtctcatcgcagataacagtatcgcaaagcatgcggttgtctttaaattcttttccccataaacgaaacataatagactcctttccggcagcagaagaaactatctgatcttctgaaaatacctgtctcttgtatcctaacataagaaaaacaaaaagtcatttcttttttagagactttttggtatagtggaacggtaatgttactgttcactccagtgtcaatcactccgctgattgacacggaggatgcgtgttttgacttgaatgcatctcgccccatcgccaaaggcgatttaaaatggcgagatgcgttgctggtcgcacatcgtgtgaacagtaacacggtaatggtaacagcaatatagtaattgatagaatgattggagagcagttatgattagagaatgtacagagacagacagagaaatgctgggaggttatctggaagaagacagttatggacaggcaatctttcatctgattgatgaatttggatttgaacagaaattccagtccgtttatatggatattgaagaagaacagtgcaaaggtgtttatcttatgatttacaaaaatgtactgctttattcgaaagagaaccaggtggaaattgatttcttggagcagatgctctctgtgcttgtgccggagatggtgattggacgaaaggataatgtgaatattgtaagctggcttctgacagactaccggatggataccgtagatcagatcccggagctttgtgatgaggaaggcaatgcgttgaagagggacacccggaagaaggaaggacaggaatggggcgtcctgtataaggaggactagaagagcgatgaagagaatatttattgacggactcagcggaatggcgcagggcttgtttgcaacattgatcataggaacaatcattcagcagataggaatgtttgttggaggaaattatggagatttaatttatttgatcgggaaagttgctgcagcgcttacaggagcaggtattggtgtcggagtggcaaggaagctggaggctcagcagcttgttacagtttgtgcagctgttgtcggtatgatcggagcattcgcggggaaaattctggcaggtcaggtgcttgtagatgggaatattgtattagccggaccgggggaaccactgggagctttcgtggcagcttatgtggcaattgagattggaattttagttacaggaagaacaaaactagatattatcctgacaccattgatctgcattggtgttggtggagttgttggattgtttgtcggaccaccgatttcttcctttatgaactggctgggttctttgattaactggggaacagaacagcagccgttccttatgggaattgtagtttcggtcttgatgggaatgatcctgacattgccgatcagctccgcggctttgggggtaatcctgaatctgtcaggtcttgcagctggagcagctacagttggatgttgttgcaatatgattggatttgcagttgcaagctacagagagaataagattggtggatttttggcacagggaattggtacttctatgcttcaggtaccgaatattatgagacatccattgatttggatcccatccattttgtcaagcgcaattttaggaccggtaagtacaatgttactccatatgacgaataatgcaaccggatctggaatgggaacagccgggctggttggtccgttgatgacgtggcaggtgatgatccagacagaagatccgatggttgttctggtgaagatcattgtgatccagtttgtacttccggcagtgatcacacttggaatttcggaatttatgagaaagaagggctggattcgccagggagacatgaaactggagctgtaggcagaaaatggattacagagattagaaagatactattacagtaacactaaaatatctctaaaaaagaagtgaattctgtgacagaaaaaggggagtatgttatacttaatatatataaacagaccgggggatgactgctatgagaagtgaacaacaggtagaagctgcgctaaagagttatgaagatgttgacagctggaagacaatcattttcctgtataatgcagcgttgaaagaagttggtacaaagctggagattcttaatgatgaatttcagcatgtacatcagtataatccgattgaacatattaagacaaggatcaagacaccggatagtattgtgaaaaagttgaagaggtatggacatgagacgtccatagagaacatggttcgctatgtgaatgatattgcaggagtaagattgatctgttcatttacatcagacatatatcgtctggcagagatgataggaaaccaaagcgatttgaaagttctttcaattaaggattatattaagaatcccaaagaaagtggatataaaagttatcatatgttagtttctgtgccgatattcctttcggatagtgtagtagacacgaaggttgagattcagatccgaaccattgcaatggacttctgggcaagccttgaacataagatctactacaaatttgaagggaatgcaccggagtatatcagcaaggatctgcaggaatgcgcaaagatggtatcagagctggatgataagatgctttcattgaatgaggcaattcaggaatgcattgcccaacaggataaggatcagattcggatgaatgaagaactgatgaatgatgtgtgcagagatgttcttggaaataacaaagaatataaagattcgaaagtacaggaaaaagtgacagagattgtaacataagacagtaatctgtagaaaatataaaactgtaataaacgaagtgagctgtggaaaatgagagattcatattttcacagctcttgttgttaaaagtgattgtgttactgtttacacgatgtgcgaccagaaacgcatctcgttatttcaaatcgcctttggcgatggggcttgatgattttctataggttcggtatactatagcaatagaagaatggaaaatatgaaagatatttagcatagaaagatgaggaaaatagatgatgataagaaaaaaactggcagttttgatgttggctggtgtgacttgtttagcatccggctgtggaaatgtggtcaaggacggaacagaggcgcttggtgaaggaagatatgatgcggcagagacggcatttgaagaggcaactaagaatgagaataaagaagttgcggcagatggatatcagggacttgggatgacttattacgagcagaaagagtatgacaaggcattggaagcatttcagaccgcattggatcagggagcagagcagacgcaggaactttataatctgaccgcagtttgcgcaatgaagacggaagattatgcgaaggcacttgaatgtttccaggctggaatcgcacttgcagaaagcaagacaggagatgacaaaacgaaagcagatacagtacttcttcaagaaatggaatataatgtgattgtctgctacgaacaacaggcagactgggaaaatgcaaagagtgcgatgaaacagtatcaggaagatttcccggaagatgattctgtgagtaaggaagcagagttccttcagacaagataaaaaggttactgcgttcagtagcagggcagattgcatattagcagatcatgataagtagataaggaaaagaaaatatgatatcaatggatgaaataaaagagagggtaattctcgttgcggtagatacggatggatctgatcaggcagaacgatccctggatgagcttggagagcttgcgaagacagcaggtgcagaagttgtcggtcgtatgatccagccaagagaaaatatccatccgggaacttatataggaaaaggaaaaattctggaattaaaggaattattgtgggagacgcacggaacaggaattatctgtgatgacgagttgacaagtgtgcagatggggaatctggaagcagaattggattgtaaaatcatggacagaacacttctgattcttgatatatttgcagccagagcagtgtcaggagaaggtaagatccaggtagaattagcacagttaaagtaccgtgcttcaagactggccggacttggaaaatcactttccagacttggaggaggaatcggaacaagaggaccgggagagaaaaaactggagatggaccgccgtctgatcagagaacgtatcagcagactgaagaaagaattgaaagatgtagagcgccacagagaattgattcgtggacagagaaagcagtccggactgaaagtagcagcattagtgggttatacttcagcaggaaagagcagtattgagaatgcactgacacaggcaggagtattggaggatgcgatgcttttctcaacattggatacaacaacgagagctttgacactggataacacacaggaaattcttttgacagatacggttggatttatcaacaagctgccgcatcatttggtagaggcatttaagagcacactggaagaagcaaagtatgcggatattatcgtacacgtagttgatgcttcgaatccacagatggatgcacagatgcatgtagtttatgagacactcagacagcttggagccgaaggaaaaccggtcattacactgtttaacaagcaagataaggttgagaatccggttaatcacaaagatcttcaggcagattattccattgcgacatctgcgaagaccgggcaggggctggaagagtttaaacaggcgttattggagattatccgtaaagagcagatttatattgaacgcttatatgatttcagtgaagcgggcaagattcagctgatccgcagtaaggggcagctgttatccgaagaatatgtgccggaaggaattgaggttaaggcatatgtgccgcaggatatttatgggagattataaatgtgtctggaattctaatgttatagaataagaaaaatagatagataacaaaaccgtaagaggaagcaggaaatgagcttcatcttacggtttttttcttataagaacagtgggaaaactgttcttggaattgcgtgtgatattatatggtgtttctgtaaagttatatcctactgtagatacggtgttgccgggctctcagggtaacttcccatggagacaagcagctgaagacctacatctcttgcagtgaggactgcattcttaacagcatccgaatcaccggttaccgcgacgatcacttcgttcgaatggcttgttccctggtccggggtcatatacttgatgacttcaaccggggaagacttcaccgcaaggtcagccatgacaagtccaatagcagcaggggaaccgcagaagaatccaaatggttttccaatcggggcgttgaatgccatatgaagtgctttgtcagcacaggcagagaaagtgaactccagatgtccggcctggctgatgtagagctcaccggcatatttgccgatatattcaagtgcaatgtcaaccgcacggcgcacgtcagagacattgtctccgccaatcacgataaaacatccatgcccgccccagccttttgtatcacgaggaagctcaatagagacaatctccgtgttcgttgacttgacagcttcgtctgctgcattgatctgtccggctgcacctgttcttgaactgatcaggccgagactcttatatgccttcttcagattcatcttctcaagaagagaagggtcaattcccgggataacaagtccgattgtatccaaaacggttgttccaacgaattcagtaagggaacaatcctgtgaaatctgttcaatgtgatgtacgtctatcatatgaatcctccatctattccaataatctgtccggtcatataagccggcgtatctgtgagctttaatgcaagctcggcaacttcctccggatcggcaaaacgtccggaaggaatctcatccataagatcttggcgttcctcttcgttcaaacgaccattcatttctgtgtcaatcacaccgcaggcgattgcattcacctgaatattactcggtgcaagttccttggcaagtgctcgtgtcaatccgtgtattccggattttgttgcggaataagcaacttcacaggaagcaccgacagttccccacatagaagaaatattcagaatctttccacattttttagataccatgtatggaatggctgcgcggctgcagtagaagacggaagaaagattcgtggcaagaatcttatcccagtcattgtcagtcatgtcagtcagaagtccgaaccaggcgataccggcattgttgatcagaatatcaacgccaccacactctttttcaataatctgaaaaatcttccggacttcgtcggggttactgacatctccgggaactgctgtacaggaaccaccgtttgagagaatctcatgtgcgagctcttctaagcgttccacctggtggacacagttgagaaatacgtgataaccggccttggcgtatgctttcgcacaggcacgcccgatgccgcgggaagaaccggtgatcagtatggattttttattcataaaagaaaacctcagtctttctgagctattaaataagcggctgatttggagagtgatcatgataaaattctaatgattactcggatacaataactataacataaaatggattggatttcattgtctttcgtaaatggatatgctaaaattttagaaaagggcgttactggatacagtaattaggatagatttgatgatttcggaagaaggagagaacacaatggcaaagacaaaggtaatctgttttacgaataataagggaggaagcggaaagaccacaacttgttcaaatgttggatttggtttgagagagcttggaaaaaaggttctgatgatcgacggagatatgcagctgaatctctccctttctttgtttgacgaagatacagtgcttgcatatgcacagagtgacaaaaatttgtatgaagcaatcaagcgacaggatgatctgacagattatatcgtgaatacaaaatacgaaggacttgatctgattccgtcttctacattgatgagttcgattgaatacgaactttttacaaaatggcagagagagtatattttgaaaaaaggattgaagaagatccgcgagtcagaggtttatgattatattctgatcgatgcaccgccgacacttggtggatgggtgatgaatattctgtgtgcgtccgattatgtgatccttccggtagaggcatctccatggggactgtttggtcttggaaatatgtttgaattcctggacagtgtagaagaaattgcaccggatctcaagcttggtggaattgtgatcacaaaggttgatacaagaaagaattatttcaaacagacattagagactctgcaagagttagatgatgtgaaagtatttgatacttacatccgcgtggacagtggaattgagtggtcgcaggataataatgcaccggtgatcgcatataagaagagcagtagaagtgcgaaagagtacatggaattaacgagagagattgcagctacattaaaaggataaaccagaaaggcaggcaatagatgcatcaggaactgatccgggaactggcgatgatcacagatgaggaacgccggatccttgaaggaaaacaggagatcgatccacagctttatacagaaaagaaggaaatggttgtggacagtgcgaaacttctgaagaaggggaagttgatccaggtcagaccgcatactcgctttgtacatttcccggcgcatacacacaattatatagaagtaatttatatgtgccagggaacaacgacacatatcgtgaacggcaatcaggttgtgctcgaacagggtgaccttctgtttctgaatcagaatgcagtgcaggagatccttccggccggagagtatgatattgcagtgaactttattgtcctgccggagttttttaacacagcattctctatgatcggggcagaagaaaatcagctgaaagatttccttgtcggggcgttgtgcggaagagatgaagagacgtcttatctgtattttcatgtggctgatattctcccggtgcagaatctgatcgagaatatggtctggacaatcttctatgacatttccaataagcgaagcagtaatcagatcacgatgggacttttgtttcttcagttgttgaattatatggataagatggaagccggcggacgcaaatttgatacagagattatggcgaatgtgtatcgctatattgaggatcattttaaagaaggcacgctgtcagaactggcggtagagatgaaagtggatgtctattggctgagtcgtgagattaagaagaaatcagggaaaacatataaagaacttcttcaggaaaagaggatgcagcaggcagtgtatcttctgataaacagcaggattgcggtgtcggatattatagaagcagttggatacgacaatacaagctatttttatagaaaatttaaagaacgctacggaatcagtccgaaagaatatcggattgaaaacatgaattaaggataaagtatagagaggatgctatttttcacagatggcatcttctttttttacgcgaatagtaaaccgaagactatattgatataaaaaccggcaatttgcatcaataacaacgcaagaaaacagataaaaataaaaaaacgacgaaataaaatcgtgaaaataacatcaaaatagcactatgcataaaagaagataggatgtataatgaaacatatgtgaaaaatacaaaaaaaggaggggcacaatgttagatatatcctattacgaaaaaacagatgagattattgcacagtatacatgtgaagaaaagtctttgatcccgattatacaggggattcaggaagaatatcgctatcttccaccggagcttttaacttatgttgcggagaaactgggaatctccgaggcgaaagcttacagtgtggcaagcttttatgaaaatttttcttttgaggcaaaaggaaaatatgtgataaaagtatgtgatggaacagcctgtcatgtgcgcaaatctattccgattctggaaggactttacaaggaactggggcttggaaaaaagaaacacacaacagatgaccagttgtttacagtagagacggtttcatgcttgggcgcatgtggactggcaccggccgtaatggtcaatgatgaagtacatccgaaaatgacacctgagaaaatgagcgagctgatcaagaagctgcgggaggaagaggaatgaggatagaaaacagaatgcagctccagttatggagagaagagtgtaaggaaaagcggcagaaagaaaactgctgtattctggtctgtggaggaacaggatgtctggcaggtggttcagataaaatatatgcccgtttgaaagaactaacttccaatatggatcatgtaacagtcaaaatcggtgaagaaatcgctcatgtgggacttaagatgagcggatgccatggattctgtgagatgggtccgctggttcgtattgaaccttataactatctgtatctgaaagtaaaactggaagactgcgaagaaatttttgaaaagacgattcttcatggagaaccggttacaagattgatgtatgaagataatggtcatgtatatcagacacaggaagaaattccattctatgccaagcagacccgtctggtgttgagaaactgcggtcatattgatgcagagcatattgaagatgcaatggcggtaggagcatatgagtctttcgaaaaagctgtgtttgaaatgactccggaagcagtgattaagacggttacagatgcaggtcttcgtggaagaggcggagcaggatttccggcgggaagaaaatggtcacaggtagcgagtcagccggaaaagatccgttatgtagtctgcaatggtgatgaaggagatccgggtgcatttatggatcgaagcgttatggaaggtgatcctcaccgaatgattgaagggatgatgctggcagcttatgcagtacaggcccaggaaggatatatttacgttcgtgcagagtatccgctggcagtacgaagactgcagatcgctatcgctcaggcggaagagaaaggacttttgggagataatatccttggaacaggattcagcttcaaattacatatcaatcgcggagcaggtgcttttgtatgtggggaaggttccgcgcttacagcttcgatcgaaggcaagcgaggcatgccgagagtaaaaccaccgagaacagtagaacagggattatgggagaagccaaccgtattgaataacgtagagacttatgcaaatatcccgatgatcattaaaaacggagcagactggtacagccgtatcggtacaccgcaaagcccaggaacgaaagcgtttgcccttaccggaaatgtaaaaaataccggattgatcgaagtgcctatgggaataagtttacgtgaaatcatctttgatatcggaggcggcatcaaggacgataaagggttcaaggcagttcagatcggtggtccatccggtggatgtctggtagaatcccagcttgacagtaagatggattttgactcactgtcaaagatcggtgccatgatcggttccggtggacttgttgttatggatgaagacacctgtatggtagaggttgcaagattctttatgaacttcacacagagagaaagctgtggaaaatgcgttccgtgcagagaaggaactaagcgtatgctggagattctggaacgtatagttgccggaaacggagaaatgagcgaccttgatgaactggaagaactggcggacatgattgaaaatactgccttatgtggtcttggaaagagtgcaccaaagccggttgtaagtacgattcatgcattccgaaaagaatatgaagagcacataatagataagaaatgtcgtgcgggagtctgttctaatcttcgtgtgtttaagattgatccggagaaatgcaaaggatgttcgaaatgtgcgaagaactgtccggtaaatgcaatcacaggaaaaataaaatcaccatttacaattgataattcaaagtgcatcaagtgtggaagttgtatcgataactgcccatttggagctgtttatacagagtagggaggatagagatttatgggaattatgacaattgacggacaggccattgagttcacggatgaacctaatgtattgtctgtaataagaaaagccgggattgatatccctaccttgtgttatcattcggaattatctatctatggtgcctgccgattatgcacggtagaagatgacagagggaaaacatttgcctcatgttcagaaaagccgagagacggaatgattatttatacaaatacaccaaggctgatgcgctaccggaaactgatactggaactacttctggctgctcactgcagggattgtacgacgtgtatcaagagcggcgagtgtcatctgcaggaactggctcaccgtatgggagttcatgagatccgctttgaaaatgtaagagagatacagccaattgatacaagttcacatgcaattatcagagatccgaataaatgtatcctgtgtggtgactgtgtcagaatgtgtgataatgtacagaatatcaatgcaatcgacttcgcgtatcgtggaactgatgcacaggtaataccggcatttaataagaagattgcagaaacagactgcgtaggttgtggacagtgtcgtgttgtctgtccgaccggtgcaatcagtattcataccaatattgatgaagtgtgggaagctttggcagacaagaatacaaaggtgattgctcagatcgctccggctgtacgtgttgcaatcggtgataattttggttatgccaaaggcgaaaatgtaatgggtaagttagtaggagtactgcatcgtctgggatttgatgaagtatatgacacatcctatggcgcagacctgacagttgtggaggaatccaaagagtttattgagagatttacttccggtgagaagatgccactctttacatcctgttgtccggcatgggtaaaatattgtgagaataaatatccggaattcgtgccgaatctttcaacatgcagatcaccgcagcagatgtttggagcagttgtaagagagtattataaagatcctgagaaaaatgaaggaaagaaaatcgtatctgtatcaattatgccttgtacggcgaagaaggaagaaatcttacgtccggaatcttatacaaatggcaagcaggatgttgattacgtgctcacaacaacagaaatcgtaagaatgatccgcaaatcaggaattgtatttgacaaagttgagatcgaagcagctgatgtaccgtttggtatcggctccggaagtggtgtgatcttcggtgttaccggtggtgttacagaggcagtgctccgtaggctgcagcagggacacaacagagtagacatggagtctattaaaaagagtggtgtgcgtggggacgacggtattaaagtgctgacttataattataatggaagagagattaaggcagcagttgtaaatggccttgcaaatgcagataaagtattgcagcagataaaaaatcacgaagcagagtatgattttgtggaagtgatggcctgccgcagaggatgtatcatgggtggaggtcagccggtgaatgcaggaccgagaaccagaaaagcaagaatgaagggcttatatgatacagatgtaaacactcagatcaagaaatcaaatgagaacccaatgattctttccttgtacgatactttgttgaagggaaaagagcatgagcttcttcatagaaatttctccggtaaataaagtatctggttgtggagaattacatttgaaatgaagatatacattttcaacaaaaatagtaattgaaaattgtacaaggtgcaaaagagaaccctaaaaacaaaatataatgcaaataaggacgctgtttttcgtaaatagcgtcctttttttacataaaaagcgtgggtataataaagtcataagaaatgaacagtaatagaaaaataacaaggaggcaccaaacaatgggcaattattatctggcagttgatatcggagcatccagtggacgtcatatgctggcatccatggaagatggaaagatgaaactggaagaggtttaccgttttccaaatggaatggataacaaaaacggtactttatgctgggatgtagatcgtctttttacagaaatcaagaacggattgaagaaatgtaaagaacttggaaagataccggcaacaatgggaattgatacttggggagttgactatgtgcttcttgatgagaaggatcagatcctcggagatacagtaggctatcgtgacagtcgtacgaatggaatggatgagaaagtgtatgaaaagatttccctttccgcattgtatgagagaacaggtatccagaagcagatattcaatacaatctatcagctgatggctgtaaaagagactcatccggagtaccttgaacaggcaaaagcaatcctgatgattccggattacttccatttcctgctgacaggtgtgaagaaaaatgaatatacaaatgcgacaacaggacagcttgtgaatccgacgacaaatgactgggattatgaactgatcgatatgctcggatacaacaaagagatgttccagccggtatctatgccgggaacagttgtaggcgaatttacgcaggacattcagaacgaggttggattcaactgtaaggttgttcttccagccactcatgatacaggctcagcggtacttgcggtaccaaccaacgatgacaatgccatttatatcagctccggcacatggtctttgatgggaattgagagaaaagaagcggactgctcactgagaagtatgcaggcaaacttcacaaacgaaggtggatacgatcaccgtttccgttacctgaaaaatatcatgggactctggatgatccagtctgtaaagaaagaattcacagaggatctttcttttgcagagatttgtgagagagcttccaaagagacgatcacatctttagtagactgtaatgatgactgcttccttgctccgaagagcatgattgaagctgtgaagaagttctgccgtgattccaagcagcaggtgcctgaaacagtgggcgagatcgcagcagttatctacaacagtcttgcaaaatgttatggcgatacgatcgaagagattgaagcattaacaggaaaaaaatacactacaatctatgttgtcggtggcggtgccaatgcaggatatcttaacgaactgacagcaaaatatacaggaaaaaaagtttctgcagggccttctgaagctacagcaatcggaaatattgttgtccagatgctacatgatggagtatttaaagacctgccggaagcaagaacatgtgttggaaaatcgtttgatgtaaaaatatacgaaaatgcgtaattcaaattcacaaaaatggaggaagaaaagatgacaagatatgaatcagccaaagaaatctatgcaaaattaggagtggacacagacgcagcaatcgcaaaatgtaaagaaattccggtttctcttcactgctggcagggagatgatgtaacaggatttgaccacgacggccctctgacaggaggaatccagacaacaggaaactatccgggaaaagcaagaactccggaagaactgttagctgatatggataaggcaatgagcctgatgccgggtaaaaagaaaatcaatgttcatgcatgctacgcaatctttgaagatggtgaattcgtagatcgtgataaattagagccaaaacatttccagaaatgggttgattttgcaaaagaaagaggaatgggacttgattttaatccaacattcttctcacatccaatggtaaaagacggacttacactttcaagcccggatgaggaagtaagaaacttctggatcgagcatggaaaagcctgcatccgcatttcacagtattttgcggagcagacaggagttccttgtgtaatgaatatctggacaggtgacggattcaaagatattccggctgaccgtatgggacctcgtgtacgctacaaagagtctatcgatgcaatcctttccgagccatttgacacaaaccttgtaaaaccttgtgtagagtctaaagtattcggtatcggtgttgaggcttatacagtagggtcagctgaattctcactgagctacgctgcaatgaacaaagacaaatgtctgccactgatggacaacggacattatcatccaacagaagtagtatccgataagattccggcactgcttacattcttcccggagattgctctgcatgttacacgtccgatccgttgggattcagaccatgtagttctctttgatgatgagacaaaagagatcgcaaaagagatcgttcgctgcgagaacggaattgaccgtacatatattgcactggattactttgatgcttccatcaaccgtatctccgcatgggtaacaggattccgcagcttccagaaagcactgcttgatgcactttgtcagccaagcgagatgctcaaagagcttcaggatacaaaccagatgagcaagaagatggttgttatggaacagtgcaagacacttccaatcggtgatgtatgggaagagtactgccgtcagtgtggtgtagaagctgaaggatggtttgacgagattcagaaatatgaggatgaagtgctgtctaagagagcataataaagagtgaaaaaatgggggatatcaggaaattgatatgccccatttttgttcgaaaatgtgaagttggtcaaggaatggagtatcctttttaaatcaaattcagagattccagcgcctggcggattccgccgtcttccaaggcgccggtcacataatcagcctgtgatttcaagtcttcagatccatttcccatagcaaccttaaatccggcagcctggaacattggcaagtcattattgctatcgccgaaagcaataacatccctcttttcgtatccaagtacattactcataacactgatcgcaagtcctttggaacagcctttcatgacaaattcaatcgttcttccaacaaaagatccactgtgaataatataatcataccatagggataattcctggcataatttctctggattacatccgggtgtgcgcttggcacttattttgttaaagtgaagattatgttcatttccacgaataggaagcagtttgtcaccgagttcctgagtgatcagatcagcaaaccagtctatgtcacttgtatattcatccagattatagtacatataatcattgccttccagtacagggataaaaccgtttgccttaatgatctctacggtcttccatgccagatcagttggcatctcacgctcaaatacccgcgttccattatattcgatatatgctccaagattagcgataagtccgtcaaatccaatctccttcataagatattccggaacaaaagcgtttgaacgaccggtacagatgaaagtcttgtgtccgttttttctcagctgttgaagtgcgagctttgtatcttctggtgttccttttacaatatctaaaattgttccatcggcatcaaagaaaagacattttcccattgtaagtattccttctatattatagtattatctctctcctaaaaatcccatgaatttacgcacagagtaattcaggataagatcctccggaatgtcagcttttcgagccaaagcttcggcatactggaagtcaccgatatgttcggtgccgtggctgtcactggagaacagaaccggataattaaagtgcttggacagattcaatattaagagatcagcgtaggtcgtatccccacgatatccatccggacttaaagaactgttattgatctcaagcagaacatggttctccattgcagcacggaaaagcgcaaaataatctacagggaatttttcgtcatcgcaatgaccgatgatattaacattaggattctccatagtcttgatataagcacgggtgttctcatctgctgttccggatttaaaaattggacgatgcatacttgctataacataatccagagactctaaaatttcatcatcaagatccagttttccttcctgatccagaatatttacctctgcaccgtaaagcattctaacaccgagacgctttggttgtgcaaatgcaaggctgcggaaataagaaatgcgtccgccaccaagcgtttttggaccatgatcggaaattccaagcatcttaagcccagctgcattggcagcttttgccatatcagtcatggtcgcacaggttccgtgcccgctggcgatggaatgtgtgtggatatcaaattcataagaagccatataatccaacccttctttctaatcgttcacgcggcagacattgtgttgattcattcgccatgccgcatatataccttaagtatgcggtattttaagtaaaatgtcaataaattcgaggtgaaacgtaaagaaaaaacaaataaaacacaacatgaaccgtattgggatttattgtaactttacagaaatataatgtgggatgtattgtgttttgattgactttgggggataaataaagtataataaatgttaatattggaagaaaggagtttaagagcaaaatgggactttatacttatgacagtactcccatcccgaagtcggacagaattccaaaactggtagaaaacctgtatgcgaagatgcctgagattgagtcggcgagagcggtactgattacggagtcgtacaaacagactgagaatgaaccaatgatcatccgtagagcaaaagcgttccagcatattttggagaatattccgatcacgatccgtgacctggaacttgttgttggaagcagtacacttgccccaagaggatgccagacatttccggagttctcttacgagtggttggaggcagagtttgatacagttgaaacaagaagtgccgacccgttctatatctctgagcagacgaagaaggaactgaaagaggcgaatgcttactggaaaggccgtacaacaagtgacctggctacagcatacatggagccggagacattacttgacattgaacacaatatctttacacctggaaactatttctataatggtgtaggacatgtgacagttaagtatggtgaagttctcgagatcggattttccggaatccgcaagaaagcagaagatgagcttgcttctatgaaggtcagtgatggtaactatcagacaaaatcacgtttccttgaggcagtgatgatcagctgtgatgcagcaatcacatatgcccgccgttatgcaaagcttgcacttgagatggctgagaaatgttctgatccggtaagaaagaaagaacttcttatcattgcacagaattgtgcgaatgtaccggagaagggtgcgacaggattctatgaagcttgtcagtccttctggtttgtacagcagctgttacagatcgagtccagtggacattcaatctcccctggaagattcgaccagtatatgtatccttattataagaaggatctcgacagcggaaagatcacaagagagtttgcacaagaactgttggattgtatctgggttaaattaaatgacctgaacaagtgccgtgatgcggcttcagcagaaggattcgcaggttacagtctgttccagaacctgatcgtaggaggacagaatgaagagggcatagatgttacgaatgatctttcatttatgtgtattacatcatctatgcatgtattccttccaatgccttctctttctgtaagagtttggaatggatcaccacatgaattcctgatttatgcagcagaacttacaagaacaggaatcggactcccggcgtattataatgatgaggttattatcccgtcactggagagccgtggactgactttgcaggatgcgagagactacaatatcatcggatgtgtagaaccacagaagtccggtaagacgaacggatggcatgatgcagcattcttcaatatgtgtcgtccgctggaactggtattttcaaatggtgtggacaagggtgtacagattggtccaaagacaggtaatgttgaggatatgaagacatttgatgaattctatgatgcttataaagcacagatggattacgcaatcgcactacttgttaatgctgacaatgctattgatatggcacacgcagagagagcaccgcttccgttcttggcaagtatggtcgatgactgtatcaagagaggaaagacactggaacagggaggagctgtatataactttacaggtccgcagggattcggtgttgccaacatggcagatgcactttacgcagtaaagaaactcgtttatgacgagaacaagattacaatgcatgacctgaagatggctcttagtacaaactatggaaaaggtctgagaagtgatgatgttgcagagatggtatcagaagtggcttctgctatgaagtctgccggacagccggtaggcgagaaagaagttgcggcaatcctgaagactgttgttgcagcgacagaatcagagcaggtgaaggcgaatggtgagagaatcctcaagctgattgatgcagtgccgaagttcggaaatgatattccggaggttgatgcatttgcaagagacgttgcctatacttatacaaaaccactggagaaatacaaaaatccacgtggaggtatgttccaggcgggattatatccagtatcagcgaatgtaccgcttggcggacagacaggagccacaccggacggacgtctggcacatatgccggtagccgatggagtatcgccatcagccggtaaggatgtgaacggaccgacagcagctgcaaactccgtttccagattggatcactttattgcttcgaatggaacactgttcaatcagaagtttcatccgtctgcactgagtggaagagaaggacttgagaagtttgtaggactgatccagtcatactttgatcagaagggaagccacatgcagtttaacgttgtcagccgtgaaacacttctggacgcacaggagcatccggaacagtacaaacatctggttgtacgtgtagctggatatagtgcactgtttacgacattgtccaagtcactgcaggatgatatcatccgcagaacagagcagggattttaagaataagaggagacagcatggaagaatatctgaagaccaaaggaagaatcttcgatatccagcggtattccatccatgatgggaatggaattcgaaccatcgtgttcctgaaggggtgcgtgctcagatgccgctggtgctgtaatccggaatcgcagcactacgagatcgagacaatgatggtgcagggagaaccaaaagtgatcggtgaggacacaacggttgcggaagtgatgaagacggtagaaaaagaccgtacttattatagaagaaccggaggcggacttacactttccggaggcgaaagcctttgccagccgaagttcgcaagagaccttctgcgggcagcgaaagagtcaggaatcacaactgcgatggaaagtatgggatgcgcaccatacagcacaatcgaagagattcttccatatttagaccagtatctgctggatatcaaacacatgaatccagagaaacataaagaatttacaggacgctcgaatgaactgatgttagagaatgcaaagaagattgcagactctcatatgacagagttgagcatccgtgttccggtaatcccgggattcaatgatacagagatagaaatccgtgatattaccgaatatgtccgcaaacttggcaatgtaagaagaatgcatcttctgccttaccacaggctgggacaggataaatatgacggactgaaccgcccatacctgatgggggatgtaaaaccaccgacaaatgaaaagatggaacgacttctgaaagtagcagaagaagtttccggtgtagagtgccggatcggtggttaaaaataaaaaacacaatcagataatctacacgaagtcgaaaacagagaaaatagtgaaaataatcacaagaaacaataaaaacaacggctgttcaaattgactaatgtgggattgtgtggtaaaataagttaagaaacaacacaaaacaaaagttttgacacgattccaaggaggagaaaaaatgcaaaacgaatacgaaatcaaaaaagaaatgtgtgaaatcggaagaagagtttacaaccgtggaatggttgcagctaatgacggaaacttttctgtaaaactgaatgaccatgagttcctgtgtacaccaacaggtgtcagcaaaggattcatgacaccagagtacatctgtaaagtagatgagaatggtaatgttcttcaggcaaacaaaggattcagaccatcttcagaaattaagatgcacatgcgtgtgtacagagagagaccagacgttcagtctgtagtacatgctcatccactgtacgctacaacattcgctatcgctggtattccgcttacacagccaatcatgccagaagcagttatcgctcttggatgtgttccgatcgctaaatacggtacaccttctacaatggagattccggacgctgtcgagccataccttcagcactttgatgcagttcttcttgagaaccacggagcacttgcttactcagacagccttctgagcgcataccacaagatggagtctcttgagttctacgcacgtctgttatggcagtccatgcagattggcggacctcaggaactgaacgatgagcaggttcagagactgtacgaactgagaagacagatgggacttccaggaaaacacccggcaaacctttgcccgaacgctaaagctggtaagccaagttgccattcatgcggtggaaactgtggcggatcttcagcagcagctccagaaggaacagatgctgatcttgtagcttctatcacaaagaaagttatggaacagctgggaaggtaatctgacagattagtaaaggagcaatgctatgaatgagcaggaaattaccagtgcagttcaggctgtgctggatcagatgaaggaagcagctccacaacatacacacaaacatgtctgtcaatgcaaaaagcatcagatgacattgaagcttgctaatgccttgattgaaaaagttaaggcagaagcggcacgtgtgggtgtgaatgcggttgtagcagtttccgacaaggcaggtagacctgtagccgtccagtgtatggatgacgcctacatagcgagctttgacattgcattaaacaagacatatacttccgcgagccttaagatgtccacagcagagttgagtcagttgagtcagccgggacagccattatacggaattcagtttacgaatgatggtaagatcgtgatcttcggaggcggagaggtactcgaagctgatggtaagatcgtcggtgcacttggtgtcagcggcggaactgctgagcaggacacagcaatcgcagcttacggaaaacaagtcttcaaggaggtattaaagtgtctataaatgaacagatggttcaggacattgtacaggacgttcttgcaaagatgcagatcgcttctgatgtacagggagaccgcggtgtattcaaggatatgaacgaggccattgaggcagcgaaagcgtcccagaagatcgtggctaagatgtcactggatcacagagagaaagttatctccaacatccgtaaaaagatcatggagaatgcagaaatcctggcccgtatgggagttcaggagactggcatgggaaatgtcggacataaaattttaaaacaccagctggtagctgagaagactccgggaacagaggatatcactacacaggcatggtcaggagacagaggtcttacattgatcgagatgggaccgttcggagtaatcggagcgatcacaccttgtacaaacccaagtgagacagttctctgtaacacaatcggaatgttcgcaggtggaaatacagtagtattcaacccacatccggcagcaatcaaaacatcaatctacgcagttaatcttctgaatgaagcatctgttgaggttggtggaccggacaacattgcttgtacagtagagcatccgacacttgagacaagtaacatcatgatgaaacatcctgcaattcagctgatcgctgcaacaggaggtccgggagttgttacagcagttctttcttcaggaagaagaggaatcggagctggagcaggtaacccaccggcactcgttgatgagacagcagatatccgtaaggcagctgaggatattgtaaacggatgtacatttgataacaaccttccgtgtatcgcagaaaaagagattgttgcagttgattctatcgctgatgaactgatgcactacatgataaatgagcagggatgctacctggcttccaaggaagagcaggatgcactgacaaatgtagttcttgcaggcggaaagctgaacagaaaatgtgttggacgtgatgcaaagacactgcttggaatgatcggagttacagttccggacaatatcagatgtattacatttgaaggaccaaaggaacacccactgatcgcaacagagcttatgatgccaattcttggtgtagtaagagcgaaagatttcgacgatgctgtagaacaggctgtatggcttgagcatggtaacagacattccgctcacattcattccaagaatgtagatcgtattacaaaatatgcaaaagcaattgacacagcaattcttgttaagaacggaccatcctatgcggcacttggattcggaggcgaaggcttctgtacatttacaattgccagcagaactggtgaaggacttacaagcgcaagcagcttcacaaagagaagacgttgcgtaatgacagacagcttatgtataagataacggaggtatagacaatggaaatgaattctgctaatgtagaagctgttgtaaaacaggtacttgagagcatgctggaaaagaaagttccagaagcagctccggcacagaaagcagcaggaaatgaaattccaaagacagctcacgtagctatgcttacagcacttgagcattttgaaatcaaagagtatccgatgccggaagttggtgacggagatattcttgttaaagttgaaggatgtggtgtttgtggaacagacgctcacgaattcaagagagacccattcagccttattcctgtagtactcggacatgagggaacaggtgagattgttaagatgggtaaaaacgttaaagttgacagcgctggaaaagctctgaatcttggagataaagttgttacatgtatgatcttcaaggatgatccggagatcacaatgtacgacctcaacaaacagaacgtaggcggagctgatgtatacggacttcttccggacgatgatgttcatctgaatggatggttctcagattacatcctgatccgtgagggatctacagtattcaacgtaagtgatctggatctgaaatcccgtgtactgatcgagccatgtgcagtacttgtacatgcagtagaaagagctaagacaacaggaatcttaagattcaacagcagagttgttgttcagggatgtggaccgatcggactgatctgtatcgcagttcttcgtacaatgggtattgagaatatcgtagctgtagacggagagcagaagagacttgactttgctaagagaatgggagctgagaagtcagttaacttcaaagatttccagggaatcgatgcacttgcacagggagtaaaagatgcattcggcggacatgctgctgacttcgcattccagtgtacaggatcaccgatcgctcatgcaaacatttacaaattcatccgtaatggtggtggactttgtgagcttggattctttatcaatggtggagatgcaacaatcaacccacacttcgatctttgctcaaaagagatcacactggttggctcatgggtatacactctgagagattatgcaactacatttgatttccttaagagagcaaaagcaatcggacttccgatggatgatctgatcacacacgagttcccgctcgagcagatcaatgaggctcaccagacaaacctggctatgaaaggtcttaagattgcaatcatcaacaaataaggtgagagagtatggaagcagtaggtatgctggaagtattcggacttgcaacagcatttgcagcggctgacgccggatgtaaagcaggaaatgtaagactggagaacttcgataaaaataaacctgcgaatgcagacgaattgcctgtaccgttgatcgtaatggtcaagttccgcggacaggttgcagatgtggaggcagcacttgaggctgctacagcgaaagcagagtcaatgacaggaattgtcacaaagtataagatctcaagaccgactgaggacactgagaagatgcttaagcttaacgcatttgacaaaggaacaccacacaaagtaacagacgaagaagtcgaagaaatttaggaggatattacaatggcaatggcacagcttgcattaggaatggtagaaacaagaggacttacagcagcaatcgaggctgcagatgcaatgacaaaagcagcagaggttacacttgtaggaacagagaaaatcggatccggacttgtaacagttatggttcgtggagatgttggagctgttaaagcagcagttgagacaggtgctgacgcagctggaagacttggagaactcgtagctacacacgtaatcccaagaccacacaacgacgttgagaagatccttcctacagtatagtttgaagtcaaacagctagaaaaggagcagtctcatgggaaaagcgtatggattctttgaaatcccaagcgttacggcagcagtggtagccgtggatatcatgtgcaagactgctgatgtgcagttcgttacatgggagaaaaaactaggtggaagacttgtcacgatcataattcgtggtgatgtatccgcagttgcgcaggccattgaagctgccgagcagaatggaatcaaaaaaccagtgagcacagtagtgatcccaagtcctcatgaggagatcttgagaatcattaacacaagtgtaaacaaggttgtataggaggcagctacagatggcagacgaaaaagaaaagaaaacaacaacagccaaagcgccagccaaaactgtacgcagagtaagaaagacggcgcaaaaggcagaaacggttcagaagaaaccggaagttcagaaggaggaacgcagaatgtcacaggaagcattaggaatggttgaaacaagaggacttgtagcatctatcgaggcagcagattcaatgttaaaggctgctaacgtagcactcgttggaacagagaagatcggatctggtcttgtaacagttatggttcgtggagacgttggagcagttaaatcagcagttgagtctggagcagagtcagcaggaagacttggagagcttgtagctacacatgtaatcccaagaccacatacagatgttgagaagattcttccacagatcaaataatagtcaaaggtaaataaagccggtacttttaggggattaagcgccgggcgctgatcccctgagagtgcttaaataagtaagtggagcaatccactttgcgaggagacacaaatatggataacagtaatgtggaattaattacaaaaatggttctcgaagcagtagagaaaaagaatgctgctcagtctggagaaggttttctcgttccaatcggagtgtccgcaagacatatccatctcacacaggagcatgtcgagattctgtttggagaaggctaccatcttacaaagttcaaagaacttatgggtggacagtttgcatcaaacgaaaaggttacaattgttggtcttaaattaagagcaatcgagaatgtaagagttcttggaccagtcagaaagaatactcaggtagagatttctgcaacagatgcaatcagcctcggtgtaaaagcaccaatcagagaatcaggaaatattgcaggaagcgcaccaatcgcgatcatcggaccaaaaggtgcggtgtatctgaacgagggatgcattgttgcgaagagacatattcacatggctccgaaagatgcgatggcagcaggagttcatgatggtgatatcgtatctgtaaaagcagataatgagagaggaaccatctttaacaacgtacagatccgtgtagatgacagctttacacttgagatgcacatcgatacagatgaagcaaatgcagcgcagattaagagcggggataccgtgaggattgtatcatgttaatgggaaaagttgttggcagtgttgtatcaacacgcaagaatgaaaacttagtcggaaataaattcatgattgtagaagtggcagatcatatgcgtcagggagcaaaacagatcattgcaatcgataagatcggcgcaggaatcggcgaatacgttctggttgtacagggaagtgctgcgagaatcggaagtggtatgccggaagcaccaatcgatgctgcaatcgttggaattattgacgaaggattaggactggagtagtgaaattatggatatgaaagaattaagcagcatattgcagcagaacggtatcgttggtgctggtggtgcaggctttcctacatatgctaaattagatgaacgtgcagagacaatcattctgaactgtgcagagtgtgagccactgcttcgacttcacagacagctccttgagaaatatgcaaaggagatcattgatacatttcatatgatcggcgagacagtcggtgcgaaagaagtcatcattggtattaagaaagcttacacagcaacgatcgaagctgtaaaggccgttatgggacagtatccggaagtaagacttggactgttggatgaagtatatccggcaggtgatgaggttgttcttatttatgagacaacaggtaaagttgtaagaccgggcggacttccaatcgaaagcggcgtagctgtatttaacgtagagacagtttacaatgtatacagagcactgaatgagaagacacctgttgaggacaagcttgtatcagtagtagctgaggtagagcacccaatcacagttcgtgttccaatcggaacaccactggaagaagtagtagctcttgccggcggtgtaactacaaaagatgcagtttacttcgttggtggacctatgatgggtaatatcggaacaggagcgcagcctgttacaaagacaacaaatgcaatccttgttcttccgaaagaccatcacatcattcagaagaaattaaagaaaaactcaatcgatatgaagagagcagcagcttgctgttgccagtgtacaatgtgtacagacttatgtccaagacatctgttaggacatccgattgagccaaataaatttatgcttgcagcaacatgcaaggatgtacaggagccgaacatcttcatcaatacgttgttctgctcatcctgcggactttgtgagatgtattcctgtttccagggactttcaccaagaagtcttatggcagagtacaagggaggtcttcgtgcaaacggaatccgtcctccgaaagtagaagcaaaacctgtaggaccggaaagagaatacagaaaagttccgatggagagacttatggcgcgtcttgatcttacgagatataaccgtgaagcaccgcttgatgaatcagcagtgccggttaagacagtacgtattctgttaagtcagcatattggagcacctgcttctgcaattgtgaaagcaggcgacatggtaactaaaggacagatgattgctgaaccaggaaagggattaagcgttggaatccacgcatccgtgaatggtttagttacagaagtaaatgagaaatatattgtcatagaatctcaggaaggacgtgcaggcaatgagtaaggctattggaatggtagaatataagactgtttcagcaggtattaccgcagctgatgctatggtaaagacttctgaagtcagcataatcgaagcacagacagtatgtccgggcaaatatatcgcgatcattacaggtgacttaagtgccgttaaagcagcagtggataatgcaaaagagatgcatggtcttcacctgatcgacagttttgtgctcggtaatccgcacgagtccatcttcccggcaatctacggtgctgcacatattgaagacgtatccgctcttggtattatggagacatacgatgcatcttcaattattgtagctgctgatgaggctgcgaagacggctatcgttgatttgatcgagcttcgtatcgcacgtggtatgtgcggaaaatcctacatgctgctcactggtgaagtggctgctgtagaagctgcaatcgaaaaagctaaggaagcaatcaaagatagaggaatgttccttgactcttccgttattgctcatccggatgctcagattcgcgacgcaatcttataatgaactctgctttaatgtctgagggaattatagttcaataccagtaacattatattggacttaggacaggaggtagttagatgcttgcgatagagagaagaaatgaaatattagaaaaactgcagaacgacagacgagttgtagtaagtgaattaagccagatttatgaggtctctgaggaaacaatccgaagggatctcgataaactggttcaggacggtttcgccataaaaagctatggtggtgccgtaattaatgaaaatgtgaatatcgagcttccgttcaacatcagaaagaatcgcaatattgttggtaaacagcatattgcggaactggtgagtgaacagatcaaagatggggacagcatcatgcttgatgcaagttctacagcagtgtatgttgcaaagacacttctcgaacagggaaagaagaatcttaccgtgcttacaaactctgtggagattatcatagagctttttggggcgcaggattggaaggttctctctaccggaggagagtcaagagaaggatcctttgcactggtaggttatcagacagaccggatgcttcgatcttatcatgtagataaggcaattatctctgcaaagggaatcgatatgaacgctggacttacagattcagatgatctgcatgcgaataataagcgaacaatgctgacaagagcaaaagaaaaaattcttgctgtagacagcagtaagttcgatcaagtagcatttgctgagataggttcattagatcagatcacaactatagttacggatgcaaagccggaaacaagatggcttcagcattttgataagattggtgtaaaatgtatctatccaaagtaaggaagggcagttatgaaaagctttcagattaaaactagagtaaattttggagataatgcgctggatcgactggcagaagtgccatataagaagatcctgattgttacagacccatttatggcgaaaagcaaaaatctgaacctgattctcgatccaatcaaaaaagcaggtaaggaatatgatatctttcaggatattgttccggatccaccgattgagaagatcagtctcggtgttaagaaaatgcttgaatataagccggatgcaattgttgcagttggtggcggatcagcaattgactcctccaagtcaatccgtgaatttgcacttcgcgtagatcattacgcagaggtagggctgattgcaattccaacaacaagcggtacaggatcagaggtaacttcatttgccgttgtatcagacccggcagaacagagaaaatatccacttgtatcctgggaattgacgccggacgaggcaatcctcgatgcagaacttgtaaagagtgtgccaccggcgattacagcagatacaggaatggacgtatttacacacgcacttgaagcatgtgtaagtacagatagaagcgatttctcaacagcacttgcagagaaatcaatcgagttggttggagtattccttctcagagcatatctggatggaaatgatactcatgcacgtcagaagatgcattccgcatcctgtctggcaggactggcattcaactcagcatctctcggactgaaccatggtatggctcatcagttaggtgcaaagttccacatcccacacggacgtgcgaacgcaatgcttcttccacatatcattgaattcaacagtgatatcaataaacatagtaagagtcagaaagaatatcttccggctgttaagcgttatgcaaccgtagctcagatccttggactgagcagctacaatgagatcatgacagttagatcccttgtaaactgggtacagtttatgttaaaagagatggatattccgctgtcaatctctcagatgggtacaatctcagaggaagagtacttcaatgcaatcgacagtatggcagatgccgcactcgaggatggatgtacagcaacaaacccgagagtaccttcaaaggaagatgttgtagaaatctataagaaattgtggaaataataagcataaaaaagaagctgcgatgtacagcttcttttttgtgcttatttatggcaaaattgccggaattcttatctggacttccgtgccctgtccttttgtactggaaaaacttaatccatagcgttcaccgtacaaaatctgtaatctgcggtgtgtattataaactgcaacatttgagcctttgctttgtgggttatggaatgtgccatctaagaacttaggtagaatatccggatcaatgccaactccgtcatctgagaggagcaacacaatatcttcatcttccatccaaccggtaagaacgatagatccggtcttttcttctttttccatgataccatgtataatactgttttcaacaagtggctgaaagattagttttggcatagaatattccataagataatcaggaatatccataataaaatcaattccattattgaaacgcatgttttgaagttcaatataaattgttacatgttctgcttcatctgcaatcgttgtgagttcctgcttccgactcagtgtcaaacgatagaaacgtgataaacgacgaaccacctcggttacttcatctgattttccctgctgagcaagccaactgatcatatccatcgtattatagagaaaatgtggattgatctgtgcctgaagagaatcaaactcagcaatgcggagattctcagcagcttttgcctggtcatccataagctgttggattttacgagacatatagttgtaagtatcaatcagttcaccaatctcatcctggctgtctgcgtctttgagttgaacaggtggttcaaaacggacctttgccatttggttaacaacaagtgacaaacgtctggtcatcgaatgcgacagacgtgaagcaataataaatgcaatcaaaagaaaagcaatataaatcaacaaaaagttacagatgatatgtgtactttttttcatgattggatccgcaggcataacggctaccatataccagtcagtattcttaatccgatagaatcctgcatatactttttttccaagtactgttttagtgataaaattgttcgaagacatgatgttttctcgtatttcatcacttgaaaaggggtacgttccatataagaacgaattggaagtagcaaccagattatctcttgaattcaccagataggcaacattttcagtactcgtaatattatcctgtagaagcttagtgaagtaactgtcagagaaataagtcacgatatagcaagggatatattcgccattattattgattgagtctcttgtaacataagcaagattaccatagttttcaatttcataatgtccaagataaaaggaaggacataacaagtttgctatggctggagaaccttgaaagattccataccagtgagtacttctgatattatccaatggctgcagggtagagtactttcgtccagctgtaaagggaagctcactttcatccaggtcaacataaattcgtaccgctgagatagattccatagagctgaactttagaacatcctgtctgaattgttctgcttccgtaccgtaggagagttctttaagattatcaagatattttccggaagtcagtcctttgtaaaaaccgctgccgcgaagtgaacgatgaacgtcaataatctccttgacggcgtcttctacaagtggagcagtttcagcagcacgttcctgttcgctacgaatggtatttgagacaatcatgtcatacagacttgtgtagaaaaacactccgatgaccagcattggaatcagcacaataatcagatgagaaaaagtcagcttttgctggattttgagatttttgtaatatccttttaattttttccatagaaagcacatttttgaatctccttatatctatcccaacattttatcgcgatattgcgaaggtgtgagcccggtgaatttcttaaaacttttcccaaaataatttccattgttatatccaactttttctgaaatatctgtgattgcataacgtttatcctgaagcagttgcatcgcacgttccatacgatattctgtgatgtactgatttaatgtctgtcctgtctgtgttttgaaataggtgcagatataggaagcagacagaaaaacgtgatcaccaatttccttgattgaaaggcgctcttcagaataatgcttgctgatataatctttgatcataaaaatagtagagtcttcctggcttgcaccttcgatggactgaaaaagttcttctgttctggtgcagagcaactgatgcatttcatcaaaggagaaacattcttccaggtgttggaggatactttcctgtccggtagattctgaggtgagctttaatttctgccgacaagtagtcagagaagagaaaagccggaagtagatatcctttacctgattcggaagcagtttcgtattattaaaatatacctgatacaaattatcaagaaaacttcgcgtatcttcctggttattatctaccagcaatgtgagaaattgttctacagatctagaaggtactgttttggaggtagcatctgattccagttttttctgatccaaaacgctgttcacagtagtgaaaaagctgctttgaagcaggataacagtacttgcataagattggtaaacctttgtgattccgcgtacagtctcaccacgggaaatataaaaatcaccgaacggagagaacatttcttttaaataattttcaatggaagaaaatacggtatcagatggaaccttttctcccaatatatgaaacacgtaatgtacattatgtaaacgaaccgcaagcgattttaaatgataatgttcaagtatgtcctggaaacgatcaaatggttcttttaaaagagcagcgttaaaatctccggagcgtaattttacaataaaagaggtaaaatatgtctgcggtgtaaaatgtatggaaagcttatctgtcagttcatcgatttcttcttgtttttcattatatggacgagtcagcaactgggcaagacgcgaagaagtttctttcgattgaagcttcatggaacttcttgtctgtaatcgtgtctggtgttcgttaattgcttcctggacagaatcctttacctcctgaagatccagtggcttttctacatatgtgatagctttcaggcggatggcggcctttaaatattctttgtctgaatatccgctcataaaaatcaggcttgtatcaggaagaatctctttgatcttctctgcaaactcgattccggaaagtctcggcatacgaatatcagatagaataatatccggttttgatgtgcacgctgtattgtaggcttccattccatcagaagcttcaaatacctgatcaataccgagtgatttccagtcaatggaagtgaccagtccgtttcttgtaagtatttcgtcatctgcaattaataatttcattgaaaaaatcctccgaaacagtttcatctaataaggtgataatcaaataattaacctgtgaatagttacattgtaacaaataaaatataaaattcaacaaaaaaccgcatataaaatacttaaaattcaacagaaagcaaagacaaaaagaaattacccgaaatcgaaagattttgcgatattaaaaaaataataccaatgctagacttaagtcagaaagaaaaagggagggataagcggtgtccgattacattttggaattaaaaggtatcacaaagattttcccaggtgtcaaagcattgaacaacgtacagttccagcttaagaagggcgaggttcatgctctgatgggagagaacggtgcaggaaagtccacgtttatcaaagtaataaccggagtacataaagcagaagaaggggaaatgttccttgaaggaaagaaagtagacttcaaaggaccaaaggatgctcaggcagcaggaatcgcagcagtatatcagcatccgacatcctatccggatttaacagttgcagagaatatcttcatgggacatgagattgtaaagaatggaatgatccagtggagagagatgaacaaacaggcaacagcattacttaaacagttagatgcagatttcaagtctacagatgaaatgggagcattaagtgttgctcagcagcagatggttgagattgcaaaagctctttcaacaaatgcaaagatcattattcttgatgagccaacagcagcattaacaaagaatgagtcagaaaagctatacaaaattgtagataagctgaaagagaaccaggtatcaataatctttatttctcacagatttgaagatatgtatcgtctggcaacaagagtaacggttttcagagattcccagtacatcggatcttatgatgtagacggaatcacaaatgcagatctgatcaaggcaatggttggtcgtgaaatcagtgatctgttcccgaagccggatgtacagcttggtgatgaggtgcttagagtagagaaactttccagaacgggattttataaagatgtttcattcagcgtaagagcgggtgagatcgttggtctgacaggactggttggagcaggaagaacagaagttgtagaaagtgtctgtggaatcacaagacctgattccggaaaagtatatctggaaggaaaaccggtacatattaagaaacctatcgatgccatgaagaaaggtatcatccttcttccagaggacagacagaaacagggtctgatcatgagctggggattaggacagaatgtaacacttccgacaatgggcaaatatgcaaaatgcggatttaacgataataagaaggaacgcgatcttgcaaaacagcttcttgaagaagttgatacaaaggcagttacaatttttgacccggcatcctcactttccggtggtaaccagcagaaagtagtagttgccaaagcacttagccaggagatgaaagtggtcatcatggatgagccgacaaagggtgttgatgtaggagcgaaggcagagatttaccagatcatgggaaatcttgcaaaacagggatatggaatcgttctgatctcttcagaaatgccggagattcttggaatgagtgacagaatcgttattatgtgtaacggaaaagtcacaggtgaactgaacaaagacgaagcaactcaggaaggtatcctcgagcttgcaatggaaaaatcaaagtaaggaggaacagggaaagatgaatgagaaaaaatcaattttgaaaaaaatcacagcttcccgagaagccagcctgctgattgtcctgattgttctttgtatcgcgatcactgcaaagagtccttctttcatgacggcgaagtcaatctcagatatgctgaagaacaatgcagttatcatgatcatggcattgggaatgcttggagttttacttgtaggaggaatcgatatctccgttgcatctacactttcattttcaggaatgacagttggaatgctgatgaaaaacagagttgttacaagcacaccgcttctgtttcttattgcagttgcagttggagcagcctgtggacttgtgatcggtttagtaattgcttatggtaaagtaatcccgattatcgcaacgatgggattcatgtacatctatagaggtatggcttacctgatcagtaatagtgaatgggcaagtgcagaaaaccttggaacatttaaaaactttgcattaggaaaaacacttggattgaacaatgttatctgggttacaatcatctgctatgtcatcttctttgttgtaatgaagtggacaaaagtcggaagaatggtttatgcagtaggaagtaacagagaagcagcagctatttcaggtattaacacaaagaagattgaccttctggtttatacagtaatgggaatcctcgcaggactttgcggagcacttgcagtatctgtatatgcatcagctcagccaaacatgctttatgcaaaagaaatggatgttatcgcagcttgtgtaatcggtggtgtaagcatgtcaggtggacgtggaacagtatccggagcacttcttggatccctgattcttgcaatcattgcaaaagcacttccgcttgtcggaattgaatcaatcgcccagaacacagtaaagggtattatcattatggttgtagttatcctcaatgtagtaacacagagagcaatggataagagcaatctgaaaggaagggagatgtaatcatggcaggaaaatctggtagaaatatttcaaatgtcccagaaaaatcactaaagaaaaatatattgagttgggaaggaatgctggttgtagtattcgtactgatcgtgatcttctgcagatcaatctcaccgaactttcatgtaacaaatgtacttagagagatgccaaaatatctggcagaaggatttatcatgttggctatggcctatgtactgattcttggagaaatcgatatctccgttggagcaattgtatgtctctcatcaacctggacttgtatggtatgcaataagggacttccattcggagcagttgttcttgtatgtctcttagtcggaacagtatgtggactgatcaatggactggttcttacaaagtttacagaattaccaccaatgatcgttacactggcaacacagatcatcttccgaggtatcgcagagatttcgcttggaagcggcggatcaatctctctgacagagactgacggattccgtgcaatcgcaggaaaagtcggagttgttccttatatcttcttcctgtttgcaattcttgcagtaatctttgcagttgttcttgcaaagacaacattcggaagatcagtatatgcaatcggatcaaatagcacagcagcttatttcgccggaattccggtacagagaatccgcctgatcatctacacagcacttggatttatgtccggccttgccgctttgttccttacatctgtactgtatggcgcaaatacaacaacaggtaacggatttgagatggatgcaatcgcaatggcagtattcggaggaatttcaacatcaggtggtaaaggaagactggtcggcggaattatcgcagcatttgttatcatcagtctgagaattggtcttggacagatcaatatgaacccacagcttatccttgtaatccttggagctctgcttattctggcagtattgcttccgaacattgcaggagaactgaaattaaagaaaaaagcagcatcagcaaaataagatgcaatcgtagcgcaaaagatgttactatagaaaagatattaatatgataccagacgtgccgggaagagacacgttttgtataaaggggcaggaaagcagttgaaaaacagactttcctgcaaaaagaaaatttcctaaaagtggaggacaaaagtatgaagagaaaaatgatcagcgcattactttgcgcaacaatggtagcttcaatggcagcaggatgtggaagcagcggaaatgacacatctgataatggcggagacaaaagcgattccggaaagaaagtatatgcaatcgtaacaaaatcagcaggaaatccttacaatgaaaaagaggcagaaggattccagaaagtcattgaagcagaaggtggagaatgtatcgtaaaacatccagaatctgcgacagctgacgcacaggtatctgttattcagtctctgatctcacagggagttgattctatcgcaatcgcaggaaatgatgagaacgctcttcaggcagcacttgaggaagctatggatgcaggaatcaaggtttgtggatttgactcaaaggtaaatgctgacagccgtatgacatttgtaaatcaggctggtacaaaagaaatcggacagactctgatggatgcagtttatgacatcacaggtggagaaggacagtgggcaatcctctcagcaacatctcaggcaacaaaccagaatgcatggatcgacgcaatgaagaaagttatggaatctgatgacaaatactccaaacttgagctcgttgaagtagcatatggtgatgacgaaccacagaaatcaacagaccagacacaggctcttctttcaaaatatccggatctgaaactgatctgtgctcctacaacagtaggtatcaacgcagcagcaaaagttcttcaggacgagaaatcttctgtaaaactgacaggacttggacttccttcagagatggctgagtacattggtgatgatgatgcacattcctgcccttacatgtatctgtggaacccaatcgatgtaggaagccttgcagcttatacatcaatcgcacttgttaacggagacatcacaggagctgaaggagattccttcacagctggagacatgggtgactatgaagtagtagatgctggagatgacggaacagagatcattcttggagcaccattcaaatttgattcatccaacatcgcagagtggaaagacgtgtactaaaatatggtaagaaaaggatttaaaatgaaattatatcctggcatggaagcagagtacgagaaaagacataacgagctttggccggaaatgcaggatatgattcacgaatatggaggaaagaactatacaatctttctggataaagaaacacttgtcctgtacggatatattgaagtagaagatccggcaaaatgggatgagagtgcagacacagcaatcaatcgtaaatggtgggacttcatggcagatatcatggagacaaatccggacaacagcccggtagcgattgacctgcatgaggtatttcatttagattaatacttataactgaatatcaaaatatcatgtgtaagaggatgttcttctgtagccggtaaagctacggaagaatgttctctttttatagtatattaattgagtgttatctgaaagaattgttgtatatactatatcaaatacctgggaaatggacagggagcgcgaaatgaaattacctatttatatagaagcagcaatgggagtttttctggttgtgattctggcaatggcaggaaaaaacggaatgattcctcagaaccagaaaaataatgttatgaaacagtcagaaacggaacagaaatcagattctgacatgcaaaatgaaaaggaagcagttgcagaagaggcaacagattcgatagaagaagttgcacagactgacagtgcagcaataacagcacagatgtgttctccggccggacagtatccggtcatgggggagagtgttgttacggtggatgagcttgcagattatttcaatcaatcgggatacgaatatccgtcggaagaactggcaaaaggcggggctgataccatagaaacattctgccagatctactgtgaagaagcagaggcagaagacatccgggcagaggttgcatttacccaggcaatgaaagagactggatttcttcagtttggcggtgatgtaagtattgaacagttcaattttgccggaataggaacaaccggtggaggagtgccggggaattcttatccggatgtcagaacaggagtgcgggcacagatccagcatctgaaggcctatgcgacagatgaaccgctgaatcagacttgcgtggataaccgttatgaatatgtgaaaaaagcttccgcaccttatgtacaatggctgggacagaaagagaacccggaaggagccggttgggcgacaggagagaactacgggtatgatattgcaggaatgttgcaacatttacttttaaaagagcaaggttaagaagataaggctggacttccggcggtggttatgatattttaagatttcttaaagaaagggaaatcccttgacaaatcagcctttgacagctatagtagtaacagttaaaaagtatttaacaactatgtaaagatacaggtgttgaagaagaggagtacatcattacttcccacagagagaaccgttcagattgctaagaggatctggctgtgagacggtttggaaaaaggatgatggaaggtagcttcggagccggaattctgaaaggtcgaagaggttggataggagttcccggagtcgttcacgttacagaacgaagagatgtatatgtaaagaacaaggttaatacaaacagtaacaagttcttacatatataaataaggtggtaccgcgagattttcgccctttacgtgaagtagagggcgttttctagttatagaagaaagagatatccacttttaaaacaatgagattgtggaaaacaactacaaaattaacataatatgtggaaaaaggagaacaatcatgagcaaagaactcgcaaagacttacgatccgaaacagatcgaagagaaactctatgagagatggtgtgagaataagtattttcatgctgaagtagacagaagtaagaaaccatttacaacagtaatgccgcctccgaatattacaggaaagctgcatatgggacatgcacttgacaatacactgcaggatattttgatccgttacaagagaatggaaggatataacgcactgtggattccgggaacagaccatgcagcaatctctacagaggttaaggttacaaatcagctcaaagaagagggaatcgacaagaaagaactcggacgtgagggattccttgagagaacatggcagtggaaagaagaatatgcaggaacaatcgagaaccagttgaagaaacttggtatttcctgtgactgggacagagagcgtttcacaatggacgagggatgttctaaggctgtagaagaagtattcatcaatttatacaacaagggatatatttacaaaggctccagaatcatcaactggtgtccgaaatgtaagacatctctgtcagacgcagaggtagagcatgaggatcaggacggaaacttctggcatattaagtacccgatcgccggaacagaccgtttccttgagattgcaacaacacgtccggagacactgcttggagatacagcgatcgccgttcacccggatgatgagagatacaaagatatcgtaggaaagatggcaatccttccgcttgtaaatcgtgagattccgatcgttgcagactattatgtagacaaagaattcggaacaggtgctgttaagatcacaccggcacatgacccgaacgatttcgaagtaggaaagcgtcacaaccttccggaaatcaatatcatgaacgatgatgcaacaattaacgagaagggcggaaaatatgcaggaatggatcgttacgaggcgagaaaagcaatcgtagctgatcttgatgagcagggataccttgtaaaggttgttcctcacatgcatgcagtaggaacacatgaccgttgtggtacaaccgttgagccgctgatcaaacagcagtggtttgtaaagatggatgagcttgcaaaaccggcgatcaacgcactgaagactggtgaacttcgtttcgtaccggagcgttttgacaagatttaccttcactggcttgagaacatcaaagactggtgtatctcccgtcagatctggtggggacacagaattccggcttattactgtgatgagtgtggtgaattcgtagttgcgaaagaagcgccggagaaatgcccacactgtggatgtacacatttcacacaggatgaggatacactggatacatggttctcttccgcactgtggccgttctccacacttggatggccggagaagacagaagaccttgattacttctatccgacagatgttcttgtaacaggatatgacattatcttcttctgggtaatccgtatggtattctcaggatatgagcatacaggaaaagctccgtttaacacagtactgattcacggtcttgtaagagactctcagggacgtaagatgagtaagtctcttggaaatggtatcgatccgcttgagatcatcgacaagtacggtgcagatgccctgagactgacactgatcacaggaaatgcaccaggtaacgatatgcgtttctacaacgagcgcgttgaggcaagccgtaactttgcaaacaaagtatggaatgcatccagatttatcctgatgaatatggagaagaacgttgtagaggaaccggaagacttcctgctgaagccggcagacagatggattctttccaaggtaaacagcctgacaaaagaaatgacagagaacatggacaagttcgagcttggtatcgcagttcagaaagttcatgactttatctgggatgagttctgtgactggtatgtagagatcgcaaaatatcgtatctaccatgcggaggaagattcacagtccgcaaactgtgctctgtgggtacttaagacagttcttggacaggcacttaagctccttcatccatttatgccatttattacagaagagatctacggagcacttgtaccggaggaagagtcattgatgatgtcaagctggccggtatacagagaggattgggagttcccatatgctacagaagttattgagcatgtaaaagcaatcacacgcggaatcagaaatatgcgtgctgagatgaatgttccgaataacaaacgtacaaaggtttatattatcagcagtgattcaaaactgcttacagcacttgaagtactcaaggaatctgtaaaaccgttgatgctggcaaacgatattattcttcactatgagaagaaagatgttgctgatgatgcagtatctatcgttgttccgggagcaacagtttacctgccgctggaagaccttgtagacttcgagcaggagagagaaagactgaagaaagaggaagagagactcaacagcgagataaagagagcacagggaatgcttgcaaatgaaagatttacaagcaaagcacctgcagataaagttcaggctgagcgtgataaacttgagaaatatacaaagatgcttgagcaggtaaaagagagaatcgatagtctcagataactgtggggggagaaaagctgcgaaaaagcaggaaactgtaaacagcagtttagacacagtatcaggtattagacggcaaaaagtcgcacggcagaaaggagctaagatcccatgccgtgcattttgcctataagaaagaggttatagatgaagcggattcatattaaaaaaccagatatcaaaggattttttacaaaggtcaaaaatctgaaaccggaagatatcaagagacactatcaggagaaaaaagcaagacgccagagaatcctggaacagagaagaaacagtaaatttgtgaaaaagatgcagccggtttataagtggatgaacagattttcactcgtccttcattatctgctggcctgtgttttaaattttttgatcgaggtgatctcaaggcatcctttttttgaagcctggagctacatgacaggaacaccgctcgtgtttctgtttaacgcatttttaatttttgcaacatttatgattgtttatctgttccgcagacgtgtatttgtcagaattcttctcagtgtattctggctgtttctgggagcatgtaacggatatctgctcctgaagcgagtgacaccgttcaatgcacaggacttgaaagttctgtcagatgccttggaactgacaagtaattactttaatggctttgagatcgtgatgctaaccattggaatcgttgctgttgttttgtgggtgatttccatgtggcgccgcggtgggcagtatactggaaagatgcaccgcattattgcagtgatcgctgttgtggcatccggatttgcctatgtaggacttactgatgttgcaatcgacaagcgagtgatctcaaattattttggaaatatcgcatttgcttacgaagactatggattcccatattgcttcgcagcaagcttatttaatacaggaatcaatcagccggccggttacagtgaagagacgatggcagagatcaacaaggatggatgtcttaacgtgagtgagacaagccgttcaaaagaggaactgccgaatatcatgtttgtccagctggaatcttattttgatccgacagaggtagaatggctgagattttccgaggatccgatcccaaatctcagaaagctttatgctgactattcttccggatattttaaagttccatctgttggagcaggtacagctaatacagagttcgaggtgcttaccggaatgaatatgcgtttcttcggaccgggagagtatccatacaagacttatgtgaagacgacacctcttgagagtgcggcaagtgcgctttcatcccttggatatggtgcagaggcgcttcacaacaacggcggtaatttctacagtcgtgccaaagtatacaacaacatgggatttgaccattatacaagtaaggaattcatgaatatcttaaagacgactccgaagggatgggcgacagatgatattcttgttccgaacatcatggagtctttggacacaacagacggaacagattttgtatgtacaatcagtgtgcagggacatggagattatccgacagagacgaccttggaaaatccggagatcaatgtaaccggagtggaagatgaaggcaagagaaatgcatgggagtactatgtaaatgaagtccatgagatggacaaattcgttggacagctgatcgatgcaatcgagcagagaggggaaccgacagtgctcgtattctacggagaccatctcccgacacttggtctggaagcaaaagacctgaaaggaaaatatctgtacaatacgaattatgttatctgggacaatattggactggaaaagaaagatgggaatatcgctgcttaccagattatggcagaagtctttgatcgtttggatattcatacaggaactattttcaattaccatcagcagagaagacagacaaagaattatcttgctgatctggaattactccagtatgatatcatgtacggaaaacagtatgtatacaaggacagtggagctccaatcacagaaggacatatggtcatgggggtaaaggatgcgacgatcaccagtgttgtggagcagctgaaaggaacttatagcatttacggagagaactttacaaaacaaagtaaggtttatatcaacggagagaagcagacaacaaaattcctgaacaatacaagactggatctgaaagagtcagaaatcaaagatggcgatcagatcatggttgcgcagtgcggttcaagcaatacaatcttccgtacatcgaagacttatgaatatacaggaggccagcttgtagaagtgacagaccaggatacggatgttgagaatggaagacaggcctttgtagaacaaaaggaagaaaagaaaaaatgacctataaggaaatcgtaacctatatagaagaaattccgagatttacaagaaagcactctctggctcataccagagagatgcttctgtttttgggaaatccgcagaatggaaagaagatcattcatgtagcgggaacgaatggaaaaggttctgtatgcgcttatctggatgcgatgctcagggcagaaggaaaaagcaccggattgtttacttcaccgcatctggtgaaaatgaatgaacggattgctctgaacggaaagcagatcagtgatgagggtttctgcgaagtatttgaagagaccatgcaggctgtccgcaggatgcaggatgcaggattggagcacccgacatttttcgaattcttatttgcaatggcgatgaaagcttatgacagagcaggaatggaatacattgtccttgagacaggacttggaggtcggttggatgcaacaagttctgtagaaccggtcgcctgcgtgatcacatcgatcggtctggatcatatggaatatcttggtgatacagtggaacagattgcgggagagaaagcaggaatcatccggccggaagttccggtgttctttgcacagacagcaccagaaagtgattctgtaattgaaaaaacagcagaaaaagaaggctgtttctgtaaaaaaatagggaaagatgcgtacgaaattcttggaattgaagataaacatattgcattttcctgcgcaagtgcttattatggaactaccacgtggaaattaaataatattggaacctatcagccggggaatgcactgcttgcgatggaagtgatgcgttatcttttcaaagaaaacggtcatccacaagagtggagaacagcacttgccagggtgaaatgggcaggaagaatggaagagattcttccaaaagtatacgttgacggagcacataatgtaagtgccattcaggcatttgcaagaagtgttccgaagaatccagatggaaatattattttattttcggcggtaaaagataaagaatatgaagaaatgatttcgtatctatgtaaacatgctgatgcggaagaatatgtagtaacattgatcgacggagatcgagcgacagatgcacacattctgggtgaactgttccggaaatatacagaacagccggtgacagtgattgaatctgtcaaagaggcaatgcagtatgtattgcgaattcaggggagaagaacggtatattgtctcggttctctttacctgacaggaatgatcaaagagattatacaggaatctttaagcggatgtggggaggtttgattgcagatgcttaattatgaagaagaactcagaaaattcaagccaagtctcgaggtggaccagattgaggaagctgtttacaaggaagatctgacagatatgcaggatatcgtaaaagaggttatggcaaagaaagaaaaaacggtgagaagatagaaagatagtggtgggtataaatggattacacaaagaagatcatgtatcagtcaaattcctggtacaatgatggactgcgcaaagcccaggtgagagatatgtccggggcaattgtttccttgcagcagagcctgcagtataacagggagaatattgcggcgcggaatcttttaggtcttgtgtattatggcataggggaagtttcagaagctcttgtggagtggatcatcagtaagaatctgtgcccaagagacaatattgcagattattatattaaaaatgtacagaattcagcgaatgaattagaatcactgaatcaggcaattaagaagtttaaccagtgtctggtttactgtcagcagaacggggaagatcttgcaatcatccagttgaaacaggtgatcgcgtctcatccgacatttctgaaggcgtatcagcttctggctctgatctatatacagacgaatcagaatacaaaggcaagacagattcttatagaagcaaagaaattagatacaacaaatgaactgacactgacctatttgcaagaagttacaaaacagcgtggcggatatgggaagaatgcagagagaagtttccggaaaccaaaaagtgcgacagtagaatacagtcttggaaatgagacgatcattcagccgaaacgttctaagatccgggatatggcacagcagcttgcatttgccaatatattgatcggaatggttcttggtgctgctttgatctggtttcttgttgctccggcggtgaatcagaaccgctcggagaagttgaataatcagatgcgtgcatacagtgaacaaatcaacacactggaagcacaggtgagtgcccagacaagaacactggatcagtatcgaacagccggagacgaggcacagaaagcagttgatcaggcaaaggcaacatctgacagctatgagaaactgcttcaggtttcaagtcagagccgttccggagaatatagttatacggatatggcagacgcgctgcttgagattactagagattctcttggagacagtggaaaagagatgtatgatacactttctgattctattttcccaacagcatgcaagagaagatatgcagccggtgtagattcactggaatcagaggactatgatcaggcgattgagtacctgacaaaggttgtgaagatggacgaaagttataatgatggacaggctatttatcgtctggcacaggcttatcagggaaaaggtgatacagagaatgcaaagacctggtatcagaagatggtagatacttataataattccagatatattgaggatgcgaaaaagcagcttgcaattctgaatggagatgccagtgcagatacaagttcagatacaagtgcagatagtagttcagtatcagaggactctgaaaattccgatgactccgacaactctcaggatggcggggataatggagattacgataattctgacaatacagaggataacgaataagattacgaaggaaaaggatatgcgaagaagcatatccttttttagcgtacggattcaggtaattaaacggaaaatgagaaaaacaggaggcatgaaaatatatgagatatcaggtacaggaaaattgtctgacgatctatcttccaagagaggtagaccatcataatgcagatgaaatcaggaaagaagcggatgcagtaatcagcagaaatcatatcagatatgtgatctttgactttgacaggacagattttatggatagttcaggaattggaatcattatggggaggtataagactgtcagtctgatcggaggagaagtctgggcggtacatacgaacgaaagaatccggaagattcttacattttcaggagcagcaaagattatgcagatttatgagggggaaaagtgatggaggcgagtaatacacagaataatgagatggagatccgctttgacagcagatcagaaaatgagggatttgccagagtatcggtagcatcctttttaacacaacttaatccaacggtggaagaagtagcagatgtgaagactgcagtgtcagaagctgtaacaaatgcgattatccacggatatgaacagagagtagagaaagtaaagatacattgtagtatagaaaaccagctttttacagtagaaatatcggaccgtggaaaaggtattgcaaatgtggaaaaagcaatggaaccgatgtttacaacaaaaccggaggatgatcggtcaggaatgggattttcttttatggaagcatttatggatactgtggaagtagagtcaaaggtaggggaaggaaccagtgtaaaaatgactaagacaataggtaaagggagcagaatatggacgacacaatcgctttaatcagaaagtcacacgacggagataaaaaagcgagagaagaacttgttgaaaaaaatataggtcttatctggtgcgtagtaaagcgattttacggaagaggtgcagaaccggaagacttgtttcagattggaagcattggactgcttaaggcaattgataaatttgatttttcttatgaagtacagttttcaacctatgctgttccaatgatatccggagaaatccggcgttttttgagagatgacggaatgataaaagtcagccgttcattgagagagctgtcctataagagtctgcaggtgagagaaaagatgaccaggatactcgggagagaaccgacattgaaagagttatcagaagagcttcagatagattgtgaggagatcgtccaggcaatggagtcgtcagtggaggtggaatccatatataagccgatccatcagaaagagggaagcgagatccttttgatggataagctggaagaaaaagacaggcaggaagaaaaggttcttgatcggattgtattaaaagaagtactggaaacacttgaagcgaaggaacggacgatcatttatctgagatattttgcaggaaagacgcaggctgagataggaaagaaaatgggaatgtctcaggtgcaggtgtcaaggacagaaaaaaaggtgctggagcggatgcggaaagaaatgaagcggtagagtttaccatcttttccaaaaaaacaatcccgctccgattcctttccctaatgcaaccattaccacaaacaccgcgagataccggacaatccttgcccgtctcataaaaatgggaaatacattcaaaatttctgcaagtgccattgcccagcaaccaacaaaaatccctccgaaaagtccataaattgcaagaaatatcatccttcccggaagattaacttcaaaaatctgaaacaagtttccaaggatcgcaccggctgctaccatatcttcataaattaaaatatgattgccggtatgggtacgatctgcaaaatctgagatcacaccaagttctacaatgaaagaaaagacaccgccagctactatcattccggcacttaaaccaagcaatgccaggaaaattatctgcaacaagttcatttttcgacctccagttctttcttttgccgtgctgcattttccaccagagttgtctggatatcattttcataaagacgcatctgtatttccatcggtgtaggatctactgtaaagcgtttcttaccaaagtgattaaaaaatattagaattccgattgcaagccctatggaatacgtgacttccagaacagaaaaaccatctgtcttctttcccatgatcagttcataaatctgaccaaacagcttcgttaccccaacatcattattgaatgccatgattgagaaggcagatccaaagaaaatcactgctgataccagcactacctttaaaatgtgccagagaagaggtggtgttttctgattttcataagtaacgataatatctgtttcgcccagattctgaatctccagccggggatactgttcatgaatacaggcaatgattttcaacacggaaattacatagcgctgttctttttcctcccggatcttcaagatccgcaaagtttttactttcatcaggatggtcttgtctgaacactccatactcaggagatctcctaacataacgttttgctttgatacctcaacattcctgtctgctttgagataaagagttgttgattcagatgccatggacgatcacctccagtttcttatccggagcagaatatttgttactgttcacacgatgtgcgaccagcaacgcatctcgccattttaaatcgcctttggcgatggggcgagatgcattcaagtcaaaacgcgcatcctccgtgtcaatcagcggagtgattgacacgggagcgaacagtaacgaatatttcacaagatatccctcatcattttgcattttcttctgtccattccaataaaacagaccaataacaactgcgcatagtaaaaggattattaaagcaaaccatctctttttcgctctgtttttcatttcatcagacctcctgaagtgttttttctattatttggtaactgttcagagccaagcaaaatttcaaaaaacaggtataaaatgcttgcatttttaaaactgtttttgaaattttatttggcggatacgccacaccgacgaaatgcgtagcattttggaggttggctctgaacagttacattatttgcagctttaataaaaatatacttttcgttttcattatcttgacaagcaataaatcctgtactaaaataagtacataagcaaaaccgaaacgtttcggttttggaaataaggaggacgatacgatgccattagttacatcagaaaagatgcttttagacgcaaagaaggatggatacgcagtaggcgcatttaatgtagagaatatggagatggttaaagcagtcatcgctgcagcggaggagctgaacgcaccggtgatgcttcagacaacaccttctactgtaaagtacggaacattggagacatttgcaggaatcgtgaaagcagaagctgcgaaaacaaagatcccggtatgtctgcatctggatcacggcaatagctttgaacttgcagttcaggcaatgaaagctggttacacatctgttatgatcgacggttcccacgaagattttgagaataatatcgcagtgacgaagaaggttgtagatgtagcaaatgcatttggtattccggtagaagctgaacttggtaaagttggcggaaaggaagacgaccttgaggctgatgttgatacgaacacagatccgcaggaagcgaaagaattcgtagagcgcacaggagtttcctctcttgcagtagcgattggaacagcgcacggcttttatgtaggaaccccggttcttgacaagccaagagtaagcgcaatcaaagaagttgtagatgttccgctcgtgcttcatggagcttccggactgagtgaagaagacgtaagagaatgtgtagagcgtggaatgtgtaaagtcaactttgctactgagcttcgtgttgcatacacagatgccgtgaagaaactgcttgaagagaagccggagacattcgatccgaaaaaactcggtgttgttgcgatggaagctgtaaaagaacaggtgatcgcacgcatgaagatgtgcggatgtgatggaaaagcaaaataaaacaagtgatagcttacaagatacagaataaggaaataagtttatgggtgcaacgatgaaagacattgcccgagagacagggctcggacttgcaacaatttcttcttatctaaatggaggaaatgtgcgtgagaaaaacagaatcaagatcgaagaggcaattgagaagcttcattttgaggtaaatgaagttgcaagaggattaaagacaaaccgaacgaagaccatcggaatcatcttacccgagttgaacaacattttcttttcagagattattacagcagcggaagatttattaagaagtcatgggtatgcgacgatgatctgtgactgcagatccgatgtgaagcgagaagaagaggcagcagaattccttcttcacagaagagtggatggcttgatcatgatgccaaccggagcagagaagaaagtatttgatagatttagaaaatccggaagaccggttgtactgatcgaccgaaggatggagaacggagattgtgactgcgttcttgtagacaatgaaggagcagcgcagaacgcagtgaaacggctgatgaaaaaagggcataagaagattggtatgatcacaggaccggataatgtgtatacagcaagggaacgtcaacgaggatatgagcttgcgatacaagaatcatccaaagctagatcagcacaacaatcagatttaaaaggaaaaacagatagaacagatacaaaacttctggcagatggtaactacacgattgccggcggagcgaaagcaatgcgcaagctttacgaagacaatccggatatgacagcagtctttatctccaactacgagatgacagtcggagcaatgatggagatcaatgaccttggtatcaaagttccggaacagctgtctgtgataggatttgataacatggattttgcaagagctgtagtaccaagattgacaatcgtgacacagccaacggaagagattggacaagcggcggcaaatctgttattgagtcatctcgaagataaggatgaaacatcagataaaacatcagacaaaatagaaacaacagagacaatctggctgaaaaccggattcgtagaaggagaatcagtggcggacatttcataaagaggaggagaccatgggagaatatttattaggaatagatatcggaaccagtgcctgcaagattgcagtctttgcaaaagacggaaccgtcaaggcaaccggaaccggtgattatcaggtttattacccacatcctggatgggcagaacagaatccggaagaatggtgggaagcagtttgcgatgcaatcccaagggtactcgtaaaaggaaatatttccccggaagagattaaaggaatcggaatcgatggacagagctggtctgcgatcgcagtagataaagatggaaatgtacttacgaacaccccaatctggatggacacaagagccacagatatctgtgaagaattcaatgaaaagattgggaaagacaagatctttgagctttgcggcaactctttgcagccatcttatacaactgcaaagatcatctggtatcagagaaatctgccggaagtctatgcaaagacttataagatccttcaatccaacagttatattgcatacaaactgaccggtgtgatgacacaggatctttctcagggatatggccttcactgtttcgatatgagaacaggaacctggaatgaagagatgtgtcaggaatttggattttcttctgagctattgccggaaattcatgcctgtcatgaagtgatcggtgaggtaaatgagaaagctgcgaaagaaagcggactggcggaaggaacaccggttgtggccggaggactcgatgcagcatgtggaactctcggcgcaggagtgattcacagcggagagacacaggaacaaggtggacaggcaggtggaatgagtatctgtaccgaccagtatcgtgccgatgagcggttgatccttggatttcatgtcgtgccggattgctggctcttacaaggcggaacaaccggaggcggcggagtgatgcgctggcttgagcgggagttcggagcgtacgaaagagaagaaggaaaacgtcagggaaaaagctcactggatttatttaatgaagaggcggcagcagtagcaccgggaagtgacggagtgatcttcctcccatatatgtccggtgagagaactccgatctgggatccaaacgcaaaaggtgtctactacggattagatttcagtaagacaaaaggacatttcatccgtgcggcaatggaaggaacagcctatgcattgaagcataaccttgatgttgcggaagaagccggagcgaaagtagaagtcctgcgtgcgatgggcggatcagcaaactccttgttgtggacacagatcaagtctgacatcacaggaaaaccaattgttgttccatcctctgacacagcaacaacactcggtgcagtgattcttgccggagtcggaatcggaatgtacaaagactttgacgaggcagtgaagcttactattgaagagaagcgttcccacgaaccgaataatgaaaacagaaaagtttacgataaaaattacgaaacatatatagaactttataaacaattaaaggaaactatggcgaaaaaccatgaataagaaataaattaacaaaagatcaaaaaaggaggatcttgaaaatgaaagcagcagttgtatgcgccaacgaagacgtacagtatcttgattacgaagaaccgacaccgggaccgggcgaagttaaggtcaaagtaaaatgttccggtatctgtggatctgatattccacgagtacttcataacggagttcatttctatccaatcgtacttggacatgagttctcaggagatgttgtagaagtaggtgaaggtgtaacaaaggttaaggttggagatcacgtatccggtgcaccgttgaaaccatgtatgaaatgtgatgactgccagaacggaaatttctctctgtgcaaacattacagctttattggttccagagagcagggatccaatgcggactatgtagtgatcccagagcaaaatgcagttgtatatgatccaagcattccgtatgaacaggcggccatgtttgagcctgccactgtagctatccacggtgtattccagaatgattatcagggcggacagtatgttgcagtactcggcggcggaacaatcggaatgtttacaatgcagtggtgcaagatcttcggatcaaagaaagttgtagtattcgacatcagtgatgagagacttgaacttgcgaaacgtcttggagctgacgaagttgtcaacacaacgaaagagaattttatggaagaggcaatggcaatcacaggcggcaaaggatacggatttgtattcgagacagccggacaggttccaaccatgcatatggcatttgaacttgcaggaaataaatcccatgtatgctttatcggaacaccgcatgtcaatcttgagttcacaccggcaatgtgggagaacatgaaccgtaaagagttcaaactgacaggatcctggatgtcctacagcgcaccgttcccaggcaaggagtgggatttgacagcacattactttgcaacaggacagctgaaattcgacaaaggatttatttacaaaatggttccgatgagccaggcacaggaagcattccagatgtttaagacaccgggacttgtacaggggaaagtaatgcttgtaaacgaagattaatcagagagggggacaagagctttgatgtgtcaaagctctgtaccgaatatgatacttacagtaacattaaatgcagcaatcgacaaaagatatgttgtggaaggctatcaggtcggtgaagtcaaccgtgtgaaagaatgtgcgtacacgccaggcggaaaaggattaaatgtatccaagccggcgtctatcgcaggagcggaagtggtcgcgacaggatttgtcggaggtcatgcaggaaattatatcgaagatgcactgaaaccatttggaatcaagagcgaattctatcatctggaagaagagagccgatcctgtatcaacatctgggatgaagtcaatcacgtgcagacagaatttcttgagccgggattcacggtatctgaggaagaatttaagggattcgaaaaacatttcacagaactggtgaagaaagcagatgttgttgctatgtcaggaagtgttccaaaaggacttgacggaacagcttatcagcgtcttgtaagaatctgcaaagaggcaggaaagaaagtcatccttgatacaagtggaaaactgcttgagatgggaatcgagacaaagccgacgatgatcaagccaaacattgatgagatccgtatgttgacaggaaaaagctgcgacaactttcaggacatggtagatgcggcaaaacagattcatgcagatggagtcgaaatcgtagcagtgtcactcggtggagatggttcctttgtcgtatgtgacgacggaatctttcgcgcacgtgtgccgaagatcgatgcggtaaacacagtaggatgcggagattccatgatcgccgggttcgctcttggacttagcgaaggactttcggttgaagagacattgaagaaagcaagtgcgatctcagcggcagcagcactcagagaagaaacaggattcttcgtaaaagaagatatggaaaagatctatccacaggtggagattgagaagattggttagattagataaaaggagaattatcatgggtgaatttattaatccggcagatgtgccaaaagtaaaattctacacaggtgatgaagcaccatgtatcggaatgggaacctttggttccgacagatttacagcagatcagattgctgaagcagtagacggagcaatcaaaagcggataccgcatgttcgattgtgccgcatgctacggaaatgaaccggagatcggtaaagtatttaaaaatgcatttgatgagggaatcgtagaacgtaaagatctctttattatgacaaaagtatggaacgatatgcacgaacatgtcgaagaagcttgcaagaaaagtatcgcagatctccagtgtgattatgtggatatgtattatattcactggccattcccaaattaccatgcaccaaaatgcgatgtagagtcaagaaatccggattctaaaccattcagtgtggaagaattcatgaatacatacagacagtgtgaaaaactcgttgaagacggactgacaagattcatcggaatctccaatatgacaattccgaaactcgaagcagtacttccattgatgaagatcaaaccggttgcctgtgagctcgagattcatccttgcttccagcaacaggaactttacgattacctcgtagcacacgatatccagccggtaggttacatgccaatcggttctccgatgagaccggagagggatatgtgtccggaagatgtagcagatctgcagactccggttatgcaggagattgcgaaggctcataactgtcacccggcgatcattgcactgaaatgggcaagacagagaggcgagattgcaatcccgttctcacttcacaattatgtaagcaacttaaaagcaatgacagaagatccgctgacagaagaagagatggcgaagatcgcaacactcgaaaaaggaaaccgccttgtaaaaggacaggtgttcttgtggcatggagcaaaagactggcatgatctctgggatgaagatggagaaatcgtgacattgtaaaaaatgagataaaatgatgttgagagatacagttcttgtaggaagttgagacttttacaggagctgtattttagtagaaaaaaggatcggattttctgcatgaaataaaaaagttgacatgcacacatttttatgataatatatcgctcgtaacatttttgtaataaatgtaataaaaatgaaaataatgcatagtattaataaagaatagcaattaaatggtaaaaattatgcaacaaaattgttaggagggtatatgaaatttaataaaaataaaaggatgtttctggcgatgtatacagcaatgatgagtgcggtcatgctgacgggatttgcaagttccacggaagcacaggggcagagtgctgtagaagcagaagtgtcaacggagccatcggatcaggaagaaactttagatgacacgcagtctgccggggatgtaggtactgactggtgtgtatcacaggaagtgatcgatgtgcagtcagggatgattgagaatgtgaagatcgcggcagttgaagcgaagattgcttatgaagcaaagctggaagaagagagacgtgcggcggaagaagcagaacggatcgccagagagaaggcggaggcagaagcggcagcagcggcacaggcagaagcagcggctgcacagcaggcagcagaaaaagaattgctggcatccctgatcttctgtgaagcgggaaaccaaccgtatgaaggacaggttgcggttggagcggttgtaatgaaccgtatcaagagttcctcttatccggatacgatggaagaagtaatctaccagtccggtcagttctcaccggcaatgtccggatggcttgaccgcgtaagagcaaaccagggctatacagaagctgcgatgcaggcggcagaagatgcacttgcaggaagcaatccgattggagattgtctgtatttcagtgtaggcggttacggaacacggatcggagatcacttatttcattagaatgccccactcacaacatctgatcaaacagagttgatcagatactgtggaatccttttccgataatctcacttgtattagagatcagaataaacgcctttggatcagtaatcttgatgaaattacgcaggcggacagcctgggtacggttgagcgcagtcaggacgatcgctttgtcctgaccggaataagcacccgttgcgtgaaagacgctggcactacggttcagctcatgaacgatgaaatcacagatcggttccgggtcgtcacatacaacattaaaatatttggacaaattgaagttctcgataaaggtgtctaccatgaaagaacgaatcgtaagtccgagcaaagaatataatccagttttgatatcgaagataaagaatccggcaatagtgatcaacagatcagaaagcataagagccggtccgatattgaagctggaatatttttttaaaatcatagcaataatatctgtaccgccactggaacttccaatgttgaacaaaatggcagagccaagagcaggaagtgcgattgcaaaacaaagctccagcatcggctggtctgtcaaaggagctttcatcgggcagacgcgctccagaaaagaaagcgttaccgagagcagaatactgcaataagctgtcttagctgcgaatttcttaccaagaacaatcattccgatcaccagaagcgtcatactggcaacaaagttgaaatcaccggctgtcataaatcctgtctttgcaataagaacagcaagaccggtgataccgccgaaggtaaagttattcgtgaacttgaaaaagtaggtaccaatcgccatgatcagtgtgctgactgtcagtaaaagaaaatgcttccccttgtctaacataaataaattcctccccaaaagaaaaatgatagcttttgtgtgcaacatccaatctaaaaatctgtcacaaatgtttgcacatatgattgtaagcgttgaaaagtgaaaagtcaacgcatgaagttattccaaaaaggaaatactgaaattaagcaaagtacgaaaaacagcatacaaaaatagaaagaaaagcaacgaaaaggaggttttggagtgtggaaccagaagttagaaataagctggatcttgcaatagaaatccgtgacgtttatgcaagagagatccttgatttcgccgggaatccggccattgaagtggaagtgctggcaggaggagaaatcataggaaaagcgtctatggcagggaaaaattatagtaaaaaagagcagacagaaaaacagcaggtgcacatcgaagaaaaaattgaactgcttaacagtcagatcgcaccggaaataatcggtgaaaatgtatttgaacaaagaaagattgatacaattctgaaagaaaacggaaatgaacagacatcctttgcaatatcacttgcagtggcgcgggcagcagcggctgcagaaaaaattccgctttacaggtatcttggaggtgtacgtgcggtacatccaagtatgccgcagttggtcagaaaagaagaaattgagatagaaaagataaaagaaattaaggtagacgagagtacgattcttacaaaactgtttgaaagaatattagaagaacagaatgaagggaagaagctgattctcagtcaggaaacagcaggaacagaagacagctttctggtagatcttgcagttgcggcgaatattactctgattttggttgaaaacagagaaagcgcttattatacagtactgaacaatcgattgttacaactggaagagaagataggtggatgaggagacctcaagaaatcagggagaaataaataatgggagcatagctcccaattgttatttagcgtcactttattttacactctctaaatacatttctgtcagttcaacagcatctgcaatacactgagaacatgggacaactttccccttttcagagactccctttaggtcacgacaataataggttccgttcttttggcggaatttttctgcaaattcttttgttttcttataggtatctgctttagtagattttccattttcaagatttccaatactgttgtccattccgataaccatcatcattccggttacagctccgcacatgtccatcatgcccatgccaaatccgaatccctcagagattttaaacattgtttcttggtctacaccaaattcctcacagaaagaacaggctacagcctgtgcacagttatatcctttgccatgtagttctaatgctttttcaacttttgtactcatttttttctccttgtgtttagaaattccaacttatttctttgatttcaaattgtttttattataacgctcttttctatttatgacaattagtattacggatttcaacagaggaaggtgatgctttgaatgatttctgaatatcacctttcatattattgtgtaaaaagcttgtattggaaggaagatatgtgtatttttatattatatgatgataccaggattgtgggagtgcattgcacgaaacaatccgtaggtatcatagttggaggagtgtatgagaataggaattatagaagatgacaatttgttgagaaaggcattagatacatccttgaaaaatcaaggttatacaacaattcttgctggttcgagaaaagaagcaattaaaaatatagatagttctgtagatttgttgatcgtagatattggattaccggatggagatggaataaatctatatcaggagcttcaaaaaaatagaaaaattccagctatttttctgactgcaaaagatgacgaaaaagatatgttaaaagcgtttgatacaggagcagatgattatgtggttaaaccattttcaataaaagtattgttaaagcgtattgaagttgtgctaaagagaaaatcaaatgaaaatatttttatgtgcggacaggttatgttatattccgatagaaaacaggtttttgttggagagacggaaatatctttgacactcaaagagtatcagcttttagaatattttattatgaaccagaaccaggttcttacaaaagagatgataatggaaaatatatggggaatcgatagtgaattcattgatcctaacacaattagcgttatgatcagcagattgaaaaagaaattgaatgattcatcgaatgttatcagtaatgtatttggaatgggatatagaatgggagagtagcatggctgtagcaatttttacagtacttttaataggtttcatactcggaggaagcactgtatatttagttgaaaatcatttgagaacaaatgaaatgaataaaatatataaattgacggaatccttaataaacggcaatgaattagatggttctgatatagggaaagaaacaatctattctaaaacgaccaatcaattaatccgtttacaggaaatattggaaggaagaaggaaagaggctgaaaaaagtaaatatgagatacagaaattaatttctgagattgcgcatcaactaaggacaccgctggcgaatataaaaaattatacagaattgctgcaagagtcattaaatgaaactcaagaaacattgaatacagaatacataaaagacttgcgaacaagtgaagaacaattatgttttttggtggagagctttataaaaactgcccgattagagcagggaatcatacaagttcacactcaaaaagaaaatcttgttgaaacgattctaaatgcgttggggcaaatacagaaaaaggcagaagagaaagatatctattttcaagtagaattgccagagaaaatcatttgcgaacatgataaaaactggatgtgtgaggccctttataatgtgtttgataatgcagtcaaatatagcaaaagcaacagcacgatcaatatcacaatgaaacagacagaaatgttttataaaattcaagtaagagattatggaatcgggataagagatggagaagaaaataaaatttttcaaagattttatcgtggtgagcaggcaagagggcaggaaggatgcggaattggtttatatctttccagagagattgttctattacaaaaagggatgatgaaagcaaaacaaatgaagccagggctgcttatagaagtgaatcttccggtatagacagttcatatgcagcgtgtaagaagtttgtaagatgtaccatgtaaaatagattatggctgagttgaaggtagcatttgcgaaaggagtttacagaaaagatggatataatcaaagccatgaatctaaaaaaatattatacatccgatacatatgaagtgcgtgccttagatggtgtgtcattaacggtggaagagggcgaatttatagcggttgttggtacctccggatgtggaaagacaacacttatgaacatattaggtggtcttgacattccggattttggaggtgtctggatcagaaatacaagtttaaaagatcttaacaaggaagaaagaacaatattcagaagaagaaatatcggatttgtatttcagcaatataatttaattccttcgcttagtatacgcgaaaacatagttcttccgatgcgacttgacggtaaggaaatcgatatagatttctttaatgaaattgtagaaatacttggattaaaagataaattagaacgttttccatcaacactgtccggtggacagcaacagagagtttctatagcacgggcattgttgacgaaaccggcaattgtcctggcggatgaaccgaccggaaatctggattctgttacaagtatggaagtcgtaggattactaaaatcctgtgctgcaagatttcatcagacgacattgatcgtgacgcatcaagaagaggtcgcacagatggcagacagagtaatacgtatgtctgatgggaaaatctatacaagagattgtaacgattgttaggagggattactatgcttcacaagaacattccgaataacaataaagacataatccgatttctggctaaaaattttgcaggcacaaaaaaggtgagaaatacgattttattttgctcgatcgtaatcggtattgttgctattactatggtattcggaatctcatttggaaaaatacaggcagaagaaataagattaatcagagaaaatggaactgcttcttcggggagaatagaagatggaacagaagaacaatatgcaaaattaaaacaactggattatataaaacaagttggaaaaagtatttttgtaggtgaagctacagaagtttcggagaacaatgcaaaaacgatatgtgatatagtctgggctgactcagaaagctggaacaattttttgagaccggcatataccaatgtgattggaagctacccacagaaaaaggatgaaattctattatctgagcgggcattgaaaaaacttggtatctctgaaccggaacagggaatggaaataaacttagatgtatacaaaggtgtgttcgaacattcaaaagaaaaattcgaattgtgtggctggtatacagactctggaaatgaattagcaatcggatatatttcacatgacaaaattaaagagttgaaactggaaaagggtccttatactttacttttcagtcagagtgatcatttaaacaggagtaaaacagaggaaaaattatatcagacattgccgatgaagagtgcagatcagaagatatacgtttctgatacagcacaatatactgctgtttctaaattcgcaggtggatatgagatggtgatattaggaacaataggaattttgtgtggaatatatttccttgtacgcaatgtcctttggatatccatgagcgaagatgttcaaaatctcggactgctccacacaattggagccacagaaagacagattacaaaaatataccggaaacaaatgaggtcactcatgttaaaaggttctgtcttgggaagtttgatctctgcactgattttagtcttattaataccggaactattaggtttccatttttatcaggaaatgggagggaatacaatactttcctttttcagaccgtggattcttttgctttctgttgtatttgtaaatggaattttgtggatagcatcggaaggcgttattagaaaaataacgaagctgtcttgtattgagagtgctgcttataacgaaaatacagttgccagaaaaacaaaacactctgggaaaatagtgcacagacgttctgaaacaggagaaatgctttatattgcatggggaaatataacacgacagaaagcacgatttatcattacaagtctttctatatttttaggagtcctatcctttgttctaatgaatgtacttacaaatggatgtgattataagcatcttcttgagaaacgtcctgattttttgctggcaggagagtttagcgaatttgggaaaagccaggggtgtggggaagaatataaaacaagagaaatcgatgtggatcctttgctgacgcagggagatggtgtggaactgttgtatgataacgattatgatgaattttcaccaatctctcaagagttggagaaaaaattacacaagatagatggtatcgattgggagaattctaatctgatcgaaggagcttatgtaactacagttatgtccagaaagggcatccgtccttatgatgaagggctttcgaatcttacaaatgacaatatggtggaaggattcagttgggatacggtacagattttaaatgacaatcaaatcttgtcgcttgcgaaatacgttcaggataatcaactcaatattgatttgaaatctttggaagaaggaaatggtgtgctgatcatacatgatcatatgctgaccccggaacagcaaaaacttgcagatgaagcaattggcgaaccggtatactttaaaactttgctctcaagagaagatgcgattcgtagaaaagaacaaagtaattctgagaataaagagaaacaacaggaagacgaattccctcaaaaagaatctgaaacatttactctatgtggttatttggatcggcaaaacgatgatttcccggaaataaatcaatcctggcatggagaatgcagcttatactattttatcagtgagaaaggctttcaaaagataccaactgagaaaaagatattaacaatggaattaactgccaatccggaaaaagaaccttatgtgaaaacacagatcagcgagctggtctccgaggaaaataaaaaacgatccgaaatgacagaagtatcaatggatgaaggaaccggcgaagcaggagtttttgttatctgtaaatcagacctgatgcagcaaaaagaaacatatatgcgaggaaatcgaattctcttaggtgctgtaagtatcgtattattcattacgggattgaccaattattgtaacgttgtattcactgggatgtacgctcgacgaaaagagtttgacgtaatgaaaagtattggaatgaccgataagcaaatgaaattaatgctctttggagaaggaagttattattttatgtgtgtggtgggattgttatttactgtaggaatggcagctttggttggggtaaagatttatatggaaaataaattgtcatatttcacattccgttggccgattcttattatcgcaggaataatgctatcacttttagtggttaatgttctggttacccattttgttgttggtttttgcggtgaagaaaaggattcgcattgatacgatgtctagacactgtgttttgccttcactttttcatcttcggagcaataagcagcactattgtcacaagaaaatatacaccatacagtaaccaagtaattgtattgttccaagggaaactcttttctggatggttcaatgcaaacattataaatacaatagctataattaacattatcacaccgataatccttgatatactctttttcatgaaaagcacctcatcatcaaactggaatttatataattatctctctaactttccccattttataggctttcccgcctgtccattagtgaaatgatatgtagtttcccttatttttacccttatgagataatcacaagggaaataagggaatttttttaatcattgcctaccactttatcaagaagcctaactgattttcgtttagcatctcttgtggagtgagcatagacattcattgtggtacttacatctgagtgtcctaacagttcctgcacatcttttggggcagctccatttgctaaaaggttgcttgtataggtgtgacgtaactggtggaaatgaaagccttcaaatccctctaatgtttttgccacctttctgcaaacagtccccaaagtagttggaagttccagacaaccatccggtcttaaacagacgaaagaaatttctttataatctgccgggacttcctctgttctgtctaagcaataatattcatagtacactctgtttttctctttgaccgctttgtagtagttcgtgtgataaagttctccgtactgcattcgattttttaactgctctttccgggcattacggaaaatctctaccagcgtatctccaaaatcaacaatcctcacttttttccgcttggttggtccgatgatatatttgcgctttgagccatcgtatcggatgctacgtcttatggtaaggcattgttcttccagatttacgtcctgccacgccaaaccgcaggcttctccaatacgaagcccggcataataggctatctggattggaagtattgcggctgggttcttttttttcagataagcaagcaatctttcataatcttctcgtgaaattggttggatatttccgtccatgtcctcgtctgaaaacaaatcaacttcatccgtctgataccgcagtttaatatactgcatgggattaaacgtaatatactgttttggaaatactgcaaagcggaaggactgctgcatgactgcggaaaaagaatggatgtaatctttgctgtaaccctttctctcttttccgtcgggatgaactcccccgaaggaaagcaaatcaaaaaaggattgcaaatgctcagaggttacattttttaatttccgttctgccagcggatgtttcttaatatttcggattgttccgaggtaattctccacagtaccattgctgagcgtacctgtttttaattcctcctctgcccacacatccaaaagttgtccgactgtgagattttccgctttggcaacaaatttctttttctcataatcatccattgcctgacggagcagtttttcagtttcacttttgctttctgttccaacgcattctttctgaacaagattgccgcttgcgtcctctacatagaagcggtagtaccatttctttcctttttttcttacagatccttttgccataatcgtatgtctcctttcgatattagacaatcggaactgatgaaatgcttcgtgcgtgtaagtatatcataactccggctgtcttactataccgattcggaatcttcgtataagacttctgataaaagatttgcaagcctttgctctgctgtttttggtttcttggaatagagccttacgatgtctgccatctcattaaaagcattgatggtgtgagtgatttcccttaagaacataatctcattatattcatcattcgattcaaaccctattgttttggcaatatccgtctgaccatcatttcccttgaagtttttgcaggcgaactggaaggaatccaaaaacagaccatattgttttaacatcagcagtaataaatcttttgaaaaagcatcttcttctttggtaagggcaagcggtaactgttccagaatatctcccatcgcatcacgaatctgtaactctctcttatccgtaatgtcggtttcatattcatctgtttcccctttgagccattccacagatacatggagtgcttccgaaagaccttccagcaccatttttttcgtattgtcaatcgaaccattctcataacgcaggattgtagaagcggtaacacccatcttttctgcgacataaggctgtgtcagattcaattccagacggcgctgttttactctgctgcctatcagcttgcgtagttctttatctttcatgctgactgcctcctttttcggtatgtatgaattatagcattgtttttctgtaattgcaatatgcaacttaaaaattatttttaatatttcgtaacgcttgacaaaaagatatgaaaaggatatacttacatcacaagaattgcataatgcaatttataaggaggtgattatatgacgcaaagaaaaattgcattatccatcgaagaagctgctgactatacgggaatcggcagaaacaccttaagacagcttgtagaatggaagaaacttccagtattaaaggttggtcgcaaagtcctgattaaaaccgatattctggaaatgtttatggaagcgaatgaaggtcgtgatttgagggatagaggaaatgtaaaagccgtaacaagaactgcggcaaattaaaaaggcggcttccaaagaaaccgccaaaggttctatcagaccgaagccatgatatacctacacgcaagaagattataccatgtgcttcttctgatacgcaaccgagaacttatgtttgtaaaagaaaggggaatgtaatcatggcaaaatcaacaaaaagttatgaagaacgaatgcttgaaatggaaaagaaggaacaggaaagccttgaaaaagcaaaacgatatgcagcacagaagaaagaacttctgaaacgaaagaaagccgaagaaagtaaaaaacgaacccataggctctgtcaggttggcggtgcggtggaatccgttctcggtgcgcctatcgaggaagaagacatcccaaagctgattgtttttctgaaaaggcaggaagccaatgggagatttttctcaaaagcaatgcagaaagaaaccaataccgatatggaggaagtgtaatggcagaggggatgagtttttcattcccttcattgctttttcatgaagggcgcacttatggacaaccagaggtcgtcccaataagtttgccacaagtggcaaccggtctgcgctcacgcttgccgggctcgttccgtcggcggggctttcagccagacctgctcatgccgcaggaggcactcttcgccagagaggcgcattccatgcaggctgctatgcgcagggcactcttacgcagagggcgttccggcaatgctgctttttctaaaactgaaagcaatgttgccggaaatctatgccggatacgtcagaaaggaggaatccagacatggcgatttttcattacacaatcaaaatagtcggacgaagtaaagggaaatctgttatctccgcttccgcatatctcaatggggatgtgatgaaaaacgaggaaacagggagaatcagttattacacttctaaaaaagaagtggtcaacacccggctgatgatgtgcgaaaacgcacctcctgaatggcagatagtaccagaagaaaatataaaacgctttcaaaaatctgtccgatacaaaaggtcagaagataaagaagctgctttaaaaaaattcaaaatcacatttcagaaacagaggttatggaacgaggtattgaagattgaaaaaaatgcagatgcccaacttggcaggtcatttgaatttgccctccccaaagaatggagcagacaggaacaaattcaatatacaaccgactatatccaaaaaacttttgtagatagaggaatgtgcgctgattggagtatccacgacaaaggggatggcaacccccatgtccatctgcttctaactatgcgtccttttaacccggatcattcttggggaaagaaagaagtcaaggattgggattttgtcagagataaaaacggaaatatcgtgattgatgaatcccatccgaactggtggcaggataagaaaaaccctgaccgtcatggaatccgtatccctgtattagacgaaaacggaattcagaagattggagcaagaaaccgcctgcaatggaaacgggtgctgaccgatgctactggatggaacaatccaaaaaattgtgaactgtggcggagtgaatgggcaaaggtatgtaatgaacatctgcctttgcataatcaagttgatcatcgttcttatgaaaagcagggaaaactccagattcctaccatccatgaaggagctgacgcaagaaagattgaacaaaagttttttgccgggcaggaaataaaaggctcgtggaaagtagcggaaaatcaaatcataaaacaacaaaacacgttattgcaaaagatactaaacacctttgggaaagtatcgggtgcattatcattatggaaggagcgattaaatgacattagaagaaagccgggaaattatacccttaatggaatccatgattggtcaaatcgaagaacagcagaacctaatggcagaaatgattctggaaatgcagaaccgggacactcaactctctcttatgcaggaacagaatcagaaattacaaaaattaaacaacgagttatccgagctgctcaacattttgccaaataccgaggaactactttccaagatggaagaacagaaaacgaagatagaacttttggaaaacgaaaatcagcaatggcagatattggcacagaagctgaacagcgaaaacagtttattactgaaacagaacaccgaattgctgaactggaacagcaggtagagaaaggacgtgatatagatgaacgaatccagagaattaaagaacgccgaacagttggaagaacttctgctcttgaccgaggagatacaagaagagttggaacagaaagaccagcttatcgtggaactgaagacgcagctcaacgaatctctgaccttgaacgagaaattaaacaaagagaacagagccgggaatattcaagcattaaagaacgacttgaagctggcagacagagcattgcggagcgagaaagagaagctgcgaagcgcaaacgtcacgatagaggaatgtcaagataaaatacgatgcttaacacaacaacgggattatgcccggacacatcagaaaatcgtagagataccggtagaaaagccggtactctataaaaaatgcgaagcctgtgaccggacagcctatcagaatgcaaaagcaagatacgaaacacaaaaagagcaacttgcaggacaatataaagcaaaaacggtaatgttccaaacaaccttgttccttcttgcatggtattcgctgacaaccactctttttcaggcagtacagtcagatgtgttcctttccgattgcaaatcattcttccatgatgcagcatcattcatacaaacttttatcggttggacgattgatgccgggcaatctgtggcacaaatcagcacaaaaattccaaatgagattatagccggaatcatatattggttattgatgatattggttgttggaatatgtgtggcagggacagggatactggcaatactgatagaaataaaggttatagaattatataagaaaaactgttgggatgttattaccctactgatgatactgacaagtgcggctgtcatcatttattttggagaagtaattaaaaaagcattatcaataaatctgttgttcttttggttaattttacaaggaatatatcttacaattcgacgctatataagtcaagatactgattgactagatacaaaatatttgataaaatataaatagaaatacagcagatcaaaggaggtaaaacttataagagcaaagaaagtgattgtaggggtagctattagtgcaatgttaatttcttcatcaattccagtaatggcattttctgttacaaacgggaataagacatttgataaaaagtgggaattgagcactacatctgatggcggaaaaggtgttttgacttatggttataatactcttgctattaatgaagattatgcacacgcatatcattcaactaaagatcattacgcatatgtcaagaatggaaatggttctttttcgggttcaaatgttggtaaaggtaattggtctaaaattgaggttgctcataaaggaaatagtattacctacggtaatagctactaaacaaaggttcgggataatggctgagtggttggaattccaaccactcttttttgtggagtgtatataaatgaagaaaaaaataaaatatataggaattgttttggttattttgttctgttgctataatttattttggtacttcgggagttataaaccatataacgaatttcagaaagacttccctgaaatagaagaatctggagtaaaaatttacacagataaagatggattccagtatagtgtgtctgtccctgattatttgctttggaatggaaatcttgcgatagctgagtcagatgttcgatatgcactaattatttggataaaaccatttcaccaaggaataagtcaaggcgtgctatttaatgactataaggatttgaatactcaaattatgttgtcaagtagcaaaaaagctgaagatcaagaagatcaatggattgttgatgaaaatagcacaatattgactacgatatttgaaaaagcaaataaagtatggaatctggggttgaaataaatgaaagcaattaaaaacttatgtttgttttgtttcctgatttttggaatacttatgcaatctgaaatatttcaagatcagctttggaacttttctacagcatattttacgtcatcacgctatgaagttgctagtgaagatatgtcgcagtttctgaaagatgtatcagaaactgcaacggagaatgatgtacatattttttctcagtacaatgaaatcaataataaatacctttcaacacttcatatttatggcgatgataaagtaatcagacaaacattaaaaaatactgcaaacatagaagaatcagaatataccgctttagtttccggaattacgaaagtaaaatttcataatctctcagaattgcaaagtacctctgtgggttatgaaaactttatctcatacataggaaatgaggacaatattatctctgcatatcagaaattatcagaaaaatatagcttaacttatccagaatattggaattctacggaaaaggacatgatttttattatatggggtatgattattgcattgatgattgttctaaatgtaattgaagtggttaggcgaaaaaaagaggttgttgtacgagtttccttaggagaaagtgctggtttcatagcatttaaggctgctttattcgatgtaacttttgacattgcattatttattgttgcaaaaatattgctgtcaaattatatatcgggagcatatgagaatagactcgtcacaattttatattccattggaattattctttccactattccatattgttctttttgcttttttgatattagaaaggcattcgcaaatgcaacacacaaaagaggagtggattttttaatttattcgttaaaatttatagcaggggtagccgctgtttttacaattaccactaatattagtagtattcataataacctatttacaaatgaacatttgttagaagaatattatgatgcaaattattttaccgtaaagactactgattttaatgctgaaaaagaagaagctttttggaataaactatacaagaatgaatataacacattaaagcctgtaatatgcttgaatattttaaatgataaaaatgatgtgatatatgtaaataatcatgcaaaagatatgttacaaggttttacgaagcagataaatgcagtagagaatgaatcttctgatttgattattttcattccaaagaatagatattttgctaaaaacaagcaattagcctatgactccttgagccatgttttaaatcatgataatttacaacaattaaatattcagtacatagagtatagcgaaacagaatacttttcctatttagatacaagtagaataaatggtatcgaaaaaagcaaaaatccgataattatttatcaggcaaacaaagatttagcagtcaatggtgggtatcttgaaagctataaagcaggagcagttttatttcaatgtgatgaaaaacagctaagaaatatcagcaaaaagtatgaagatatgcttggaaattatcagctagtaattacaaacgtacatgaacagtatttatataatcacacatttttaataaaactcgtgggatttttaagttctctttgtacgattgtattgcttttaaatattatgattattgttacagtaagtagactagagttccgagaaaatgcaatgaaaatttccttgatgaaaatctttggatatagtttatttgaacggcacaaaacacttcttaaaatgattgtagtggaaaattttgtgatattagtaggtatgcttatctattctttattatcggtacagactgaagtaggaattagcattcttgttagttcatttatggcactaatagaatttacaattattttctttaatatcacaattgttgaaaaaacaaacataccgaaatcattaaaaggaggttgcttatgataacaattgaaaatctatgcaaagcatataatgataaaattttgttcaaaaattttcatttggaaattccagatagccgttttttggtaattagtggcgaaagtggatgcggaaaaagtactttacttaatatgattggaggtattgaaactcctgacaaaggttctattattgtgaatggttttgatgtggcaaaaaaaggaaaaaagcagaaatatttcaaagaagttgttggatttttatttcaaaattttgcccttttggaaaacaaaacagtaaaagaaaatctagaaataataaaaaaatcaggtagaacggatatttcaataaatgaagctcttgaaaaagttggtttacagaaagtaattaacaaaaaagtctatcaattatctggtggcgaacagcagagagttgcgttagctcgtttaatgctaaagaaatgttcgattgtattagcagacgaaccaactggttccttagacaaaaaaaatagtgagattgttatgaatatattgcatgagttaagtgaacagggaaaaacagttattgttgtaactcatagtgaagaaattgtagcacaagaaaagcatgttctatatttataattacccataatagaagaatatgttctttcgggagacacctcctctaagaacatattcttttggttaaaattgattataaagatacttttatttcagtatattcgctatattgatgggatatatatttgcatattatttatatggataaggattataactctagtgagtcttctgcatctacccacatctgtaaattaccctcaagatataatcttgcatattccaaaggctcatccacagccaatgaagtaagcgcacattctgatccgtatgtggtttttagatttttttcagctttccagcaatcaatgcgaagcatatatccggcacttgtgtaaacatcaatactatcgtgatttatgttgtattctgcataaattgttctcatcgtatcttatctccattttcttttaataatcagttatagagttaaatatcgaaaacatttcaatcagttcaccatgtcgttattgttatactgtgttatgaaattttctttcccttattttttcccatattaaggttcatgaaaaccaatgtgagaatataacacaagggaaagagtaagggaaagctcacttgctacaaacttagtattttcaagggtttgcgaagaatttgataattaaatataacagttattaaatttcctaaaatatgtgaaatatcaactggaaatttatttggaagattttattatccattcatcaagaaatttcatttgttcatccgtatgaaaccaatgctctccatttttcataatagaaagtgttgaattcgttctctgtgcaaattcaagtatcgttccataagcggtaagattatctttttcaccatacaaaatgtgcgttgggatttcccatataataggattttctcttgcatagcaaagataatcccatgaaagagtctctccaaaggttgtctgaatttcttttttctctttgagttcatcctctgtaacatttgcccaaatcatcatatcagcaataagcctttccatatctacaacgggcgaaataaaatatgctttctctatttgctgatttgataaggcattgatagcaaaatacgctccaatgctattggcaattacttcaacagtcttgtagtttctataaattgaattaaaaagtaatggaaattcttcttttgcttcccatggaaactgtgcagtatagtcgagaccaatcacatcacaattactaaagagcggtttgtaatgaatagcttcttcagcattaccaccttttccatgtatataaataactgctttatccacaatagttatcctccacaaattcaaatttatctatttgcataatcaatcaaaatcttcttacaactactacaacgataagcttcacaatgagggattcctcctgaacctttactcaattccagatcgtccgatttttttatacgaaaaacttttgtcagattatcaactgcaaaagtaatgtctcgtgaactcattaggtatcctctaatcatttcatcaccacaatatggacatttcatgcagattcacctcctataaatcccgatttgtagaattcaaaaatttaatatgaaatgtgagatagagcgtatggaaattaactatacgttctatttttttccttttttgaaaagtgattaaaaaactattgacattttgttactggtgtccacacaaagcgcttcctatattagaaaaaatagtgtatacttaacgagtacatatgttcgaaaaaggagtgcaatatgagcaaaaagaaatttaaaaccatattatgtggatgtataacggctctttgtctgtttctgacatcctgtggatcactgcagatatcacaaggatcaggcaatcaggacactgaccgtgtaaatcaaacgacaacagaaacgacattcgcatcgacagggcagatagaatccgttgatacgctggaagaagtaccggagtatacaggacagccctacgtggagatcaatgataatgagccaacatttacagaagatgagctgacggcagattcttacgaagaatacagcccgttagatgaactgggaagatgtcagacagcggaagcctgtgtaggtgaagatttgatgccgacacagaaaagagaaagcatcagtagtgtgaagccaacaggctgggtgaataaggaatatgatggaattgacggtggatatctgtacaaccgctgtcatctgattgggtttcagctgaccggtgagaatgcgaatgagcgcaatctgataacaggaacacgctatatgaatgtagatggtatgcttccattcgaggatgaggtggcagattatgtcaaagaaacggataatcatgtgatgtatcgtgtcactccaatctatagcgacgatgacctggtggcttccggagtccagatggaggcgaagtctgtagaagatgatggcgcaggggtaacatttaacgtatacgtatataatgtacagccatatgttgtgatcaattatgagacaggagagagttatcagacggaagaactcgcaacgccggaaggtgagtgggctccaggaacagaagctgaagtaactgataaaaatgtatccaattcgtcaacaacatcaaaatcaaccaaaaaagaaacttatatattgaataggaatacaaaaaagtttcataaatcaacttgttctggtgtgaaggacatcaaagcagagaacaaagaagagtatacaggaagtaggtcggatttgattaaagaaggatatgagccttgtggcagatgcaagccgtaagagttatgagaagagttatgagattagaaatggttgctggtcgcacgaagtgagaacagcaaccgctaatgtgtaagcacatgtggtctcagacctttttgctatagagattattatagaaaatataatatcaacatataacagatagttccgcctgcaatggatagaaacatatttttcttccatatatgaagtactgcggtgacaagaatggagattccttctggaattccatgagttccgtgcagtacttctacatttttcagacaatagataactaacattccgaaaacagcagaaggaagaaatttaccaagatactggatatattccggtgtctttttattttctttaaaaataaagaaaggaagatagcgcgttgccattgttccaagtatgcacattccgattgtaattatctgttgtgccaaagtcatgctactcatttggtcggctcctccttttctttaagtttgtcgcattgttccagccactttcgaagtactgtcagtagaagtacaatcagtatcattgtcggaatcataaaggaatccgctccgaagaggatcagacatacaagcgaaaccaggattccaatcatagaagaaacatggattttttctttcatccactgatccaggaaaattacaacgaacatagctgtcatgacaaaactgattcctgatgtgtcgaatttaagaagagaaccaatgattccaccaatcgttgcggaagcaacccaatagaactggttcaataatgtaacaaaaaaatagaaccatccgcggtctacatcttcgggaatctcagaggtgtaattgacggagaaggtctcatcacacattccgaaaattagataatacttcttccatccaagtcctttgaatttatctaacatggaaagtccatagaaaagatgtctggcctggatcatcacagccatgatcagtacctgaacaggtgcaaatggactaagcagcatctcaacacagacaaactccagtgatccgccgaaaatcaacatactcatgaaaaatgggtagataaaagaaaaaccagatgcattcatatatattccataagccattccaagaaaaatgaacccagtcataatagggattgttcgtggaaaggctgcctttagtgctctacgtttcataattttattatagtacctcctgatatagttcagaattatagcatgataggcttgatttatgttaatgtctttcggattgtacaatttttttgaaaaaagtgtttacaaaccacataaaactatctataatacaaatagaaaccacaagaaaacaatagcgaagaagaaataaaccacacaaaacaacattgcggtaaatgagtaaaaacaggaggagtaaaataatatgaagattttagatgcgaagtttgtacaggattttattaaaatggcaaatgacggattccttcagggatggcatgagagaaatggtggtaatttaagttatcgtctgaaaccagaagaggttgagctgatcagaccacgtctgaatgaatcaggagaatggacagagatcggaacagaagttccgggacttgcaggagaattcttccttgtaacaggaagtggaaagtatttcagaaatattatcgttgatcctgaagtatgtcttgcaattatcgagattgattatacaggaacaaaatacagaatccgttggggtctggtagaaggtggaagaccgacaagtgagcttccaacccatctgatgaaccatgaagtgaagaagagaatcacaaacggaaaacatcgtgtaatctaccatgcacatacaacaaatacaatcgcactgacattcgttcttcctttggatgatcaggtatttacaagagaactttgggagtcagcaacagagtgtccggtcgtattcccggacggagttggagttgtaggctggatggttccgggcggaagagcaatcgcagagaagacagctgaactgatggagaaatacgatgttgctatctgggcacatcatggaatgttctgttcaggagaagacttcgatcttacattcggtcttatgcatacagtagagaagtcagcagagatccttgtgaagattctttctatgacaccaagaaagattcagacaatcacaccggagaacttccgcgaactggcacatgactttaatgtaacacttccagaagagttcctgtatgagaaaaagaaataattaaatttctaagaaaataataaaacgtatcaaatcgaccggatattcgatagtgataattgaaatccagtcagtttgatacgttttttataaccatttcttaaaagtgcgtgctataataaaacaggtcggaaattctatagacgatcagaaaagcgaaaggaatggataaagtagatcaatgttatatacaatcccggattattatcatgaatttacctgtgttgcaggaaaatgtgaggacacttgttgtgctggatggcagatcgttgcagatgaagcttcattagagaaatataaaaatgagacaggtacatttgtagagcgtttgaaagaatctgtcaactgggaagaaggaacattcaagcaggataaagaaagaagatgtgctttcctgaatcaatcaaacctctgtgatatgtataccgcactgggagaagagagcctgtgcagaacctgtaaattgtatccaagacatatcgaagaatttgaagatgtgcgggaggttacactttctgtatcctgtccggaagtggcgagaatcctgatgaataaaaaagaaccggtacattttcttacttatgaaacagatgaggaagaagattatgaagattttgatccgtttttatattcgaaactgttagatgcaagagatgtgatgattgagattttacaggacagagagaaaaagctgaatctgcgagcagctcttattctggcgattgcacgtaatctgcaggaatgtattgacgaagaagatatattctcgatggatgatgtatttgattactatcaggctgaagaaggcgtgcgggaagtgaaaaatgctcttgcagaagtggattactatacatatagtaggaagatgtttcaaaatcagtatcagatggaacatttaagagcggattgggaatcttatcttcaagaagcagagaaactattatatagaaatgtaaatgaaaaaatagacaaaaaacggtatgttgagatgatacaagaatttcatgcctggatggcgaaagaaatgccggaatatgaaatacaatatgaacagctccttgtatatttcatcagtacctatttttgcggtgcagtatacgatggagaagcgtttgcgaaagcacagatggctgttgtcagcactctgttgatccatgaacttctgatggcacagtggatgaagcaagaaaaagtgctagatataaatgatgtgatagatacggtatatcgttattcaagagaactggaacattctgattcgaaccttaatttaatacaagaattgctacaagaaagtaacgaatagatgggagaaattcttgacagtgtttttttaacatgttatgctatagtcgattttgagagacgaagatgcagagtaacagacagagtcttttcaaagcaattgtttcggaccacccagcgaggttaaggccatacggacagccgggtccactgccgattatggtaactttggttgccttattgattgagtgaaaagctctaattttataagtaggtttctttgatagccttatgcgccagacgcgcagacttgtgaaacggtcaataagagtagtaaaagtataattgctatatagactctgacacgcatgatccagaagttttatttaaaaatctaagagaagatattgccttttctgttacagctgagaataaaacagacgaatatataccgaacgcaggtttgtggcttagcgcccttatctgcgttttttctgtattaagaaagtgttttgacaaaggaacctggaaagagaggaaatatgaaagggagtcgttttaaattaaaccagaatcatgcaccgatccatgaggctctggagactttccggcgaatgagagttgtgccatttgatgtccctggtcataaacggggaagaggaaatccggagttgacagaatttctcggacaaaaatgtgtaggcgtcgatgtcaacagtatgaaaccactggacaatctctgccatccggtatctgtaatacgggaagcagaagaactggcagcagatgcctttggagcagcacatgcatttttaatggtagggggtacgacaagttctgtacagacaatggttctgactgcctgcaaacgtggagatgagatcatattgccacgtaatgttcacaggagtgtgttgaatgcacttgttttatgtggtgcgatccctgtttatgtaaatccggaggtagaccagcggcttgggatttccttgggaatgcagagagaacaggtagcaaaagcgataaaagagcatccaaaggcagtcgcagtgttagtaaataatccgacttactatggaatatgcagtgatctgcgagcaattgtcaagatggcacatgaggcaggaatgatgtgtctggtagacgaagcgcatggaacacatttttatttcggtggcggacttcctgtttcagctatggaggcaggtgcagacatggcgtctgtatctatgcacaaaagcggaggcagtcttacacagtcgagtctgcttcttacaggtccggacgtacatgccgggtatgtgcggcagatcatcaatctgacacagacaacatcaggaagctatcttctgatgtcgagtcttgacatttcaagaaggaatcttgcacagcgtggccgtcagattttccatcaggtagcagatatggcggaatatgccagagaagaaatcaatgcaatcggtggttattatgcatttggaaaagaactggtaaatggaaattctgtttttgattttgatattacaaaattaagtgtacatacgttagatatcggactcgcaggaattgaagtttatgatattctgcgtgacgaatacgacattcagatcgaatttggagatatcggaaatattcttgcctacctttcgatcggagaccgcgcacaggaagtagaacggcttgtgagtgcacttgcagagatccgcagacgttttcagacagacggaacaggacttctgagtcaggaatatattgatcctcaggtagtgaccagcccacaggatgctttttatgcagataagtgcagtctgccactcagggaaacagaaggtatggtctgtagtgaatttgtgatgtgttatccgcctggaattccgatccttgcgcctggagaacgcattacagcagaaattctggattatatcgagtatgcaaaagcgaaggggtgtaatatgaccggaccggaagatccggatattttgaaactgaatgttctgacagggaggtaataacaatggaaatgtggttttcagaattccatacaccggatgtgaaacacagtatccgggtaaatcgtcagctcttttccagacagagtgattatcagagaattgatatttttgagacaccggaatttggccgtgttctgactctggacggaaatgtaatgctgacggagcgtgacgaatttatttatgatgagatgatcacgcatgtgccgatggcgatccataaagaagcaaaagagattatggtgattggagccggagatggcggtgtcgttcgtgaactgaccagatacgacagggtcaggcacattgatctggtagaaatggatccgatggttgtcgaggcatgtcgtgcataccttccggaaaatgcatgcagactggatgacagaagagtacatcttcattacgaaaatgcactccgttttatccgaagatgcgaggcgaaatatgatctcattatcgtagattcttctgatccgtttggcccatcggaaggattgtttacccgcgaattttatgggaattgttacaatgcgctgaaagaggatggaattatggtcaaccagcagggaagtccattctacgcagaagatgcacatgcaatgcagcgaagccataaaagaattgccagtacatttcagatcagtcgtgtttatcaggcacatatcccaacctttgccgcaggttactggttgtttggatttgccagcaaaaaatatcatcccgtagatgatctggacgcagaagcatggaatgcattaaatcttcgtacacgttactatacaacaagactccataaaggagcattttaccttccggcatttctggaagacatgctgaaagaagtggaggaataattcatgattttaccgaatatagaaacttttatcggatgcgaaagcagctttgaggaagcatcgattgtcctttatggtgcgccgtttgattcgacgacaagttttcgtccgggcgcaagattcggtccggcagctatgcgtcatgagagtttcggacttgaaacttacagtccatatcaggacagagaccttatggatatcagtgtatttgacagtggggatctggaactttgctttggaagcagtgaaatggcgctttcggatattcaaaagagagcagaagaaatattgaaatcagataaatttccattgcttctggggggagaacatctggtgacgctggcagcagtacgcgctgtagctgcgaaatatccggatctacatatcatccattttgatgcacatgcagatttaagggatgattatctgggagccagattgagtcatgcatgcgttctgcgaagatgccatgatcttctgggagacggacgtattcatcagttctgtatccgaagcggagagagagaagaatttagatttgccgcgcagcatacagatttccatccactttcttttgacggactggaagagactgtaagagaactgaaagagaaaaatgtaccaatttattttacaattgatctggattgtctggatccggcagtatttccgggaacagggactccggaggcggggggagtaactttcttagagcttcttgaagccatccgtacagttgcacaggcaaatgtagtaggagcggatgtgaatgaacttgctcctatgctggatgcaagtggtgtctcaaccgcaacagcatgtaaggttcttcgtgaactgcttcttgcaattgcaaaataaaccggcaacttataagagagcaattataaatatacaactgttgaagaaaaggagaagagttatgagcagagtacttgtaatcggctgcggaggagtagccagtgtagcaattcagaaatgttgtcaggcagatgaggtcttcacagaactttgtatcgcaagccgtacaaaggaaaaatgtgatgcacttgcagaaaagctgaaaggaaagacaaaaacagttcttacgacagccaaggttgatgcagacgatgtggatcagctgatcgaactgatcaatgattacaaaccggatctggtaatgaacattgcgcttccatatcaggatctgacgattatggatgcatgcctggcatgtggcgtaaactatatggatacagcaaactacgagccggaagatacggatgatccgaagtggcgtgcaatttacgaaaaacgctgtaaagaagaaggattttcagcatattttgattattcctggcagtgggcataccgcaaaaaatttgaagatgcaggtcttacagcactgcttggatgcggatttgacccgggtgtcacacaggcatattgtgcatatgcattaaaacatgaatttgatcagattgataccattgacattctggattgcaatggcggtgatcatggctatgcatttgcgacaaactttaatccggaaatcaatcttcgtgaagtaagtgcaccgggaagttactgggaaaacggacattgggtagaaatcccgccaatggatattaagagagaatacaactttgatcaggtcggagacaaggacatgtatctgcttcaccatgaggaaatagagtctcttgcaaaaacaattccaggtgtgaaacgtattcgtttctttatgacttttggacaaagctatctggatcatatgcgttgtcttgaagatgtaggaatgctttctacaacaccgatccagtacaatggacaggaaatcgttccgatccagttcctgaaagaacttcttccggatccggcaagtcttggtccacgcacaaaaggaaaaacaaatatcggctgtatttttaccggtgtaaaagatggaaaagagaagacttactatatctataacgtatgcgatcatcaggaatgctaccatgaggttggaagccaggcaatcagttatacaacaggtgttccggcaatgtgcggagcattgatgatgctgactggaaaatggatcagaccgggtgtatatactgtagaagaatttgatccggatccgttcctggatgcacttgaccgttatggtctgccgcgcagtgaaaatcatgatccgaagttggtagactgatgaaaagattagataaaagagcaccatttacagccaccggcggaattattccgccggaatttcagaacatcaaaacaccttgctatatactggatgaaaaagcacttatagaaaacgcaaaactgctcggtgaagtagcagaacggacaggatgtaagatgcttctggcacagaaagcattcagtaattatgattgttatcctttttttgaaccgtatctggcgggtacagaggccagtggattgtatgaggcaagactaggggcagaggaaatgactggaaaagaagttcatgtattctgtgcaggttaccgggtggatgaattcgaggaacttcttcagtatgccgatcatattgtatttaattctccgtcccagcttcttcgctttggaagaatggcgaaagaggcaggaaaaagcgtgggactcaggatcaatccggaatgctctacccaggagggacatgagatttatgacccttgtgcaccgggaagccgcatgggtacaacaagagtacagtgggatgaagctattgtgaagaatccggagttgatggaacttttagatggggttcatttccataccctctgtgagcaggattcagatgatctggagacaacccttgcttccgtaaagaaacagttcggcgatttgattgccaaagtgaaatggatcaattttggcggtggtcatcatattacaagaccaggatatgatattgagcgactggagcaatgcattcgaatagcacaggaagaatggaaggttgaggtttatctggagccgggagaagcctgggcattgaatgcaggatttcttctgaccagtgtgctggatgttctgaaaaatggagacacacagattgcaatcgtagatgccagtgccgcctgccatatgccggatgtactggaaatgccttatcgcccaccgcttctgggagcatcggatgagacaacagatagcgggattacagtccggttaggaggtccaacctgcctgtcaggggatgtgatcggagactataaattcagcaaattaccggaatacggagatcttcttctgtttggagatatggcgatttatacgacttgcaaaaacaatacatttaacgggatgccattgccggatatctggatcagacatgctgacagaaccatgcagcagctaaccgtatttgattatacagattttaaagaaagattaggaagccgtgaatagcggcttcctaatacatttatctaacacatttcttgtttcacatcaacgtccatacccaatatacaactccaagcgcccaacttgtcacaattccatacaagatcacaggcccggcaatcgtgaagatcttacagccaataccaaaaacctgcccctccttcttatattcaattgcaggtgcagcaacagagttggcaaagccggtaatcggaacaagtgcaccggcaccgccccatttggcaagtagtggataaattccggtaccggtgagaaggatactcaggagaatgagcagaatagaagtccagctgctgcagtcatccggggaaagttttttcaattcacagaaatgataaatacattgtccgattaggcagatcgttccaccaaggaagaacgccttcatcatgttaaaccacacattgtgctgtggtgttttctttttgacataggcttcgtattgcttctgttgcttcaattgttctattttgtccataaatgaaaatcccttctttttgtttttaaattctacacatagtttttcacaaaaatgaaaataatatccttaaaaataaataatgaaacatcagaaatgaggaaatgatatgaatgatacgggaaacaaaaaccgggcagttgaatcagagtgtggtccttttcatctgtcccagcttcgtggagcacagagcattgtattcacaaaagcaccttatcttctaagcgcagcatctgttgccggaagcaaagaagcgcaggggccgcttggaaaatacttcgatctgacaaatgaggatgatctgtttggagcagagacctgggaggaagccgaaagcaacatgcagaaggaagcctgtgtactggcacttggaaagtcacatgtggatccgaagtctgtgcgttatctctttggaggagatcttctcagacaagggattgcaacttctatgggtgttgaagatctgcagattcccatattcggcttgtatggcgcatgttccacatcaggagaagcactggcattagcagcaatgagtgtggcagcaggatacggagattacatgctggcagtaacatccagccatttcggaagtgcagagaaagaatttcgatttccgttaggatatgcgaaccagagaccactttccgcacactggaccgtgacagccagcggggctttccttgtaggaagccgtctgaataaaatacattccgataagcaacgtcaaagaaaatcccagttccggcatattcggatcaccggcgttacgatagggaagatcgtggactttggcttgaaggattcgcagaacatgggggcatgtatggctccggctgcaaccgataccatttaccgcaattttcaggatcttggacgaacccaggaggattacgatcagatcataacaggtgatcttggatatattggtcagtccatactttttgacctaatgaaaagcagaggatatgatatcagaaaaaagcatatggattgtggaatgacaatctttgaccaggagacacaggatacacatgccggaggaagcggctgtggatgcgcggcatcaacactggcttcatatattctgccaaagcttgagaatggagaatggagaaagatactcttcgtgccgaccggtgcattgatgtcaacagtcagcttcaatgaaggagcaagtgtgcctggaattgcgcatgcaattatgatcgaacattgttgaaaagccctattataataggaagaagtaaaaaatgtgctaagtgtgtgttaaaaaaagaaaaggaatagaaaaatggattatataaaagcatttttaatcggaggtctcatctgcgctgcagtgcagattcttctggacagaacaaagctgatgccgggacgtgttatggtattactcgtctgcacaggcgcagtgcttggatttattggagcatacgaaccatttgtaaaatttgcaggagcaggcgcaagcgttccacttctgggattcggaaatgtcctgtggaaaggtgtgaaggaagctgttgataaaaatggattcctcggaatcttcctgggagggttcaaggcaagtgctgccggaatcagcgcagcacttatctttggatatttggcttcactgatttttgaacccaaaatgaaaaaataaacaaattttaaccagaaaaatacagagcttatcaaaatgcataaaaaaagtacttgacagtataaaaaaaataaaatattctattcacggtggaaagtgaaaaagaaatgatgtaagggggcacaatagagttcgattatagtgtctcttttattttttaaaggattgacgaaaaatgattgatgtacatagccatatcttgccgggggttgatgatgggtcggcttctatgaaggaaagtcttcagatgctctccatagcaagaagacaggggattacagatgtatttgctacttcacattattccagggcatttccaaataaaaatccggagaagctgagacaactccgggatgaactgatgcgtcgtgccaaccgcccggtgaaaggtccggatggaaaggtgaagcatagacaacaaattcagatttggacaggacaggagattttctactcgaatagtgtgatccgtctgcttgaagaagacaaattgcttacattggcagacagcaattacgtgttgatcgagtttatgccagcggtaccttattccgagatctgtactgcagtacagaatttgtcaaggacgagatatgtcccagtgattgcacatgcagaaaggtatcgatgtctcagaaaagggaaacgattagaagaactgatcgggttagacgcattgattcagatgaactacagatctgtcggcggcagctggcatgatgtaacagcacgttggtgcagagataatctgaagaaaggcaatgtccatttgatgggaacggatatgcacaataccgggaaccggatgccggatacaaaagaggcgatgagttggatgcggacacatttggacagaaaatatcttaagaagataacaaaagataatgcgcttcgcattacagaaaacaaactaataagataaaggggagtaatgatgggaaaaacacatgatgatgacgaggtagagattgacctcagagaactgttctatgcattgaagaagcacattctgattattcttgcagcattactggtcggagcagtgattgccggtgcggctacaaagatctttatcacaccagtttacagtgcaacttctacaatgctggttctgacaaaggagacaacactttcctcactggcagatcttcagattggcagccagttaacaaaagactacaatattctgatcacaagccgtacggtattgcaggatgttgtagatgagctgaaccttgatatggattacaaagctttgaaaggatgtatcacagtagataatccaacggacacacgaatcctttcaatcacagcaacaagtacagacccggagatggcaaaaaagattgctgatacactggcgaagacatcatctgactttatcggagataagatggaagtgacaccgccaaagattattgaagaaggtgaagttccaacagtcaagacaagtccaaatacaaagaagaatgtgatggttggagcattagcaggctttgtactttcagcaggtgttatcattctactcacactgatggatgatacaatcaaatcagaggatgatattgagaaatatcttggtctgacaacactggcaacgatcccagatagaaaagactttatcacaggaaaagggccacgtaattccagaaaatcagcaaagaaaaagaagagtaaaaggagaaaaaaataaatggcaattcagagagttctgatgacagattccagaaaagaagacgtcttctatgaagaggctattaagaccctccgtacaaatatgcagttcagcggtgtggaaacgaagagtattgttatcacaagctgttatccgaatgagggaaagagtgatgtgacttttcagcttgcagtagagattggcaagatgggaaagaaagttctgattatagatgcggatatccgtaaatcaaactatgttaagcgttttcaggttgaacagaaagttgatggactttcacagtatctgagtggacaggtgaataaagaaaagattctatattccacgaattattctaatgtagattttatctttgccggtccgtatgcgccgaacccatctgagcttctggagcaggagcttttcagtaaattgatcgaggagacaagaaaaggatatgactatgtcttgatcgatacacctccgatgctcagtatgagtgatgcatcaattgtcgcaaagcagtgtgacggagcaattcttgttattcagaatgaagcagtcagcagaaaagatgcattgagagcgaaagatcaattaaagaagagtggatgtaagctgcttggtgctgtactgaataaggtcgatatgaagaaggaaaagtactataatagatataattcttattattactacggaagtaaagagtaggaatcaatagacaatgtttggaaagaaaaataagaatcagaagaaacaatggatcataggattctgtggattgttggtgatcggcgtagctggaggaatgctagctgcgaagatgacaacaccggtttcagatactaagaagactgacaaagatacggcagggcaggattcagtagaggaggattctcttacggatacaattacctggaaaggcgagaagtatcggtataacgatcatctgagtaatttcctttttctcggaattgatacaagagagaaaatagagacaaatgtaggtcatgcagatgcaggacaatcagatgcgctgtatcttctgtcctgggacagaaaagagaatacaattactacaatttcaatccccagagatacgatcacagaagttgaagcatatggaccgggcggtgagagccttggaaaaagtcaggatcatatcagtctggcgtatgcatatggtgacggaagttacaagagtggagaattagcgaaagaagcagtgtctactctcttttatggattgaatatccagggatattgtgcaatcaatctggatgcattgtccattttgagtgacagtgtcggtggtgttacagtcactgtacctaacgatagcttggaagaaaagtatcccgagtttaagaatggcagtcaggtaacactggacggaacaaatacagagatatttgtacgttatagagacatcaatgttcatcagagtgccattgcaagaatggaacgtcagcaggtatttatcaaagcattcgaagaagctgcgaagaaaaaaatcgcggaagattccggttatacagtgaagatgtattcggacttagagccatatatggtgacaaatatcagcaaagatcaactgttgaagatcactcaaagtatgacagaagggaaagaagatacagactggacagtaccgggagaagctgttgaaggagaagaccatgatgaatatcatgtcgatgacaatgcactgtatgaaaagatgattgaaacattctataagaaagtttctgatccgaattaatcagtgcagaatacaggaagaggaacagaagaattcagcaatcataaaatgctgtggtgaaagaggtgcagtacttgtgaagaaaaatatttacaagataatcgcaattatagccggagtggctgcagttgcatgtgcggctgtaggtggctacaagtattatcaggagaagcatgccggtgataattacgaagaagtgcgggagacggtaaagaaagagaccgaacctgcaccggtagaagagaaggcacctgttgaaatcccaattgattttgcggcactgcaggaacagaatccggaagtatatgcatggattcagattcaagacacaaacattgattatccaatccttcaaagagaaggagataacggatattacctggaccatacgatcgacggagagaagaagacagaaggttccatatttaccgaagattataacagcaaagattttgaagatccgaatacggtgatttacgggcatgacatgaaaaatggctctatgtttcagaaccttttgagttatcaggataaagacttttttgataaccataaagatgttataatatatacgccggacgcaattcggcattaccaggttttcgcagcatatctgtatgatgacaggcaccttatgcagagttttgattttaatataaagtctgtttaccaggcttatctcgacagcatttttgctatccgtgatatgagtgccaagattgacacgtcacagaatgtgtcagttgatgacaagatcatcacactatcaacatgctatggcaatcagtcagacaagcgttttctcgtgcaggctgtactggtttctatagaaaaataattttaagaaaggaagagtgggaaacatgaagaaaagaatttttggaactatccttgctgcagctctgatcgttactcaggcggttgccgcatttgcagcacctttagctccgagtaagacagcattaccaagcgtaactggttcaagtgcatctagttatattattacagctgcatcttcagagtctttttctgatgtgaagaacgaagagatcattaatgatcttcttgcagtgaacagcggaacaaagtcattgacagatgtcgttggtaaaacaactccagaactgacagatcagttagctgggaaagaaatggcttctccattttttgatttgaaaccagtgaacggtggaatcaagaatgaagaaggaaagtatgtagttacaatttctgtaccatcccttacaaaagcaatgactgatgttcagattctccactacagtacagtaagaaatctgtttgaattaatcacacctacaagtgtagattatgagggtaagacaattacagctgtatttgaagatctttcacctgtagcaattattgctaaggttgatgcttctaaagctgctgattctacagtcggaacatccccgaagacaggtgtaccgtctacatggatggtattcttcggagcagctgtaatacttgcaggagtttctgcagtagcttacagaaaagaaagataatttgattatctctgattttgaacatatgtggtagaagatgatttcactgcatatgttcaaatgatttattagtagttgtagtgattttatagttgatggaatgagttcagtaaaatatcagaggaaaaggatgtgcgtgaatgtacagaaaaagtggtgacagctggctgaagcatttggactttattgttctggatcttgtagcattacagttagcttatataagtagttatgcattacgcatgggagcaggaaatctatataagaacagtttatatctgaatattggaattattattgcgttaacagatatttgtacagctttctttacagagccttaccgtggtatcatgagaagaggatattttgtagagtttaagaatgtgttaaagcatgtattttttgtgagtgcgcttgtgattatgtatttgttcatgagcaaacagggcgataagacatcacgtcttatgatcacgtcatttattccattatcagttgtttttgtttatgcagtacgaatcatatggaagcgatatttattaaagcatggtcgtctgctttatgtgaaaatgaatatgctgcttgttacaacaagtagtgaaattgagtatatgttgaaacgcgtggaacagaacgcgtttaatgaatttgaaattgtcggtattgtatttgcagatcgtgaaccgaaagagaatgaatcttttgcaggaattccggttgtaagtaagattgatacattaactgattatatacagacaagatggatagattccattcttgttggaattaagaagaaaacattgataccagaagagttatttgaaacttgttcaaatatgggaataacagtccacgaatgtctggatctgagaagtggatggtcaaagaatcagtttatcaaccgtatgggaggatatacagttcttacttcaagtattagaatcatcaccgcgcgacaggcagggatgaagagattaattgacatctgtggtggaatcgtagggatgatactgacgtgtattatcacaatattcctggctccggcaatctatattgcttcaccgggaccaattttcttttcacagatgagagttggaaaaaatggtaaaagattcaagatttacaaattcagaagcatgtatatggatgcagaggaacgtaagaaagaactgatgaaacagaacgagatgaagggtcttatgttcaagatggagaatgacccaagaatcatcggaagcggagcggatggaagcaagcacggacttggctggtttatccgtaaaacatctttggatgaatttccgcagttctggaatgtacttaaaggagatatgagtctcgtaggaactcgtccaccaacagtagatgagtggaaacagtatgagccatatcaccgcggaagacttgccgtgaaaccgggactgaccggaatgtggcaggtgagcggaagaagtgatatcactgactttgaggaagttgtaaaacttgatatggaatatgtcaagaactgggatatcggaatggatattaagattctgttcaagaccgtcggagtcgtgcttaagggcagcggatccaagtgatggattggatggaagagatgaagtagaatgaatgatgatctgcagtggaaccgggcgggaaaactgcaggtgttatcagtattgaacgtatagctagaaggagaaaaaagagaggaaagacgagagactttggaatgaatcaagttggatgttttttctttttgagataattaaacgtatagctatatagagaaaattgtttatagataatattcgagaggaatatagaggaatgttaaaaaagaaaaatcttctgatctacgctcattactatattccagatactgcgtcaacggggcagatcctccgtgaattggcggagggtatgctggataaattcgacataacagtcatctgcgtggtgccgagttacttagggacgattgaggataaatataagacacggaaatattacgaagaagaaatcaatggtgtaaaggttctgcgaatccgagtgccggagttcagcaagaccaataaaaagagccgtgtaaagaatattgtttcttatttctttggagcaatgggtgcaacttttaaggttggcaagatggactatattttttctatctcacaaccgcctattcttggaggactgctgggtgtttggggcaagtgggtgaagcatgccaagtatatctataacattcaggatttcaacccggagcaggtgttggctgttggttataccaagagcaaactggtgacagatgccatgatgtggttcgacaagttcagttgcaagcgtagtgacttgataatcacggttggtcgtgatctggtggagacggtggagaaccgcttcaagggtaagaaagtcccaaagactgtcatgatcaacaactggatcgatgagaatgaaatctatccgctgaatgagagaaatgaaagagttgttgctttcaagaagaagtacggtcttgatggcaagtttgtcattatgtattccggcaatatcggcctgtactatgaccttgagaatctgatgaaggttgtggagagaattaagccgggtactaagactgcggatggcagagaggttgtgtttgcttttgttggtgccggttctgtgctggataagctggtgctctatgtgaaagagcgtcatatggacaatgtggttttcattccgtatcaggataaggctgacctgatttatagcctgaacgctggtgatgttcactggtgtgtgaacgcaaaaggcattaaaggagtgagttgtccgtcgaaggcatatggaataatggctgcggctaagccgatattaggagtgcttgaagaaggttccgaggttcgatatctgattgaagatacacacggtggtctttgctgtgagccgggtgagtatgacaaggttgaggagaatatccgctggttcattgagaacgccggaagtgatgaactgaagatgatgggagccagaggacgagagaatctggagaagaatctgaccagagatgtgtcagtgaggaagtatgcagaagaaattctgaagctgtgagggaggcaagagatatgaacagtaactggtttaagctggttatgaagatgacgaaagttgaatatggaaagaacctcttgctgaagggtgtgccaatcatcttcaacaaaggtggtgccaagctaaagattggcgagaacgttacaatcaagagtagcttccttagtaatctggttggtctttatagcaggacgatcattgtcacgcgcgctccgggagcagagatcgagattggcgataacgttggaataagtggagcaacaatttacgctcgaaagaagatcacgattggcgagaatacctgcattggcggcaactgcaagattctggacaatgacttccatccaatcgaggcagaagcaagaaataaactgctacgggatgaaaatggcggtgatagtgatttggtgccgagccgagagattaagattggaaagaattgcttcatcgggtgcaattcgataatactgaagggcacagtgctgggtgatggctgcgttatcggagccggtgcggtggttgctggaaaatttgaggataactgtgtgattgcgggaaacccggcgagagttattaagaggttggaggaaaagaactgatgaagtattttgcctttctcacgttccttatctttacatgctatttgctgggggttgtcaagaaaccggaaaaataccagtggatggacagaaattatacaacagcaattaaaggattttctattctgactgttgtctgggcgcatagtggagcaaggctttccgtgggtggaatccaattcattgcaggaattggcgtggcattatttctgatgtgctccggatatggattagaggtttcatatgagaagaacaggctaaagggcttctggaagaaacgcttgctaagtgtgtgcctaccgttctggggagtggagctagtaggactgcttgtcacaggtacgttttccattaagacctatctgttggatttctgctttttgaaatcagcaaccagttacggttggttcatgagatatattgtcctctgctatctgattttttacgtagtaaagagattgattaaagatagtagaatgcagacgatggcgctgtttggaacctttactatctggtttgtgttggagtctgtattctttgcaaatccagatatgccgttccttcgtgcaagacagatgctgtctttcccagctggtgtattgcttgcagtaaataaatataagattgaacggacgctgacaagagctaaaaatatcctgattttaacggggggggggtacagtaggccttctcttcatggcaataacacaactgaatgcggttaaaagcctgccgtacattgtgtcgaatgtaatggcgctattgacctgcttgccgatggcaataggaattatggcatttggaaaattcttcagcgagttatctgaaaacaagatgttagctgtgaccggaatgatttcgtatgagatttatctggttcatgcttttacattagggatgataaagccatcggtggtatcagttcttgcttttgtagttgtcacagttactttagcatatgtaacgtatttcacaataggaaaaatgaaaaatggcaaatttaacaattattatcctcacaaagaatgaggagcaaaacttagaaaagtgcattgcatcttttaagagcgtggcacagcgtattgtaattattgattcctattcgactgacaaaacagtggagctggcaaagtcactcggtgcggaagtttatgaacatccgtttgaaaaccacgctgtacagtttaactgggctctggataacattgacctgaacacagagtgggtgatgaaggttgatgcagacgaggagtttacttcggaactggcagatgagattgacgaaaagctggatactctttctgcaaaagtgaacggtgtaattcttcgccgtagagtttatttcatgggaaggtggcttaaacacggtggaaagtatccggaacttttactgagaattttccgtgtgggtcatggaatgtccgagatgaaactcatggatgagcatcttattgttacggatggtgatgtggttaccttcaaaaatgacttttctgataataataataaatctttggaatggtggatcaataagcataactggtattcaaataaggaagtgctggatcagcaaatgaagtcggatgatgcaaatggagaggaatccgtggaagaaacctcgacgtcaatgcaggcgaaggtaaagcgttttgtgaagaatcatggctattatagtttgccgaagttctttcgggcgcatttgtattttatttacagatattatttcagatttggatttttggatggtactgaaggaaagatttatacgtttctgcaggcatattggtatcgctatttggtggatgccaagttgtatgaatgtgaaaagttaggagtaaagatggaaaagcaaggagcattagaggcaacctcctccagaattaatgggggggtaacgcaggataagctggttacctttacaaatatagggtgccactacacagaaatggtggtggcagcatgacagatttaacagttgttattcttacaaaaaacgaagagaagaatctcagaaagtgtgtggagtctttttgtggagttgccaagagattcgttattgtagacagcttcagtacagacggaacagaagcactgtgcaaggaattgaatgcggaacttcagaaaattggttcagcacttgatttttaccagaacaaatgggtttcctatgcggatcagctaaactggggacttcagaatactggcattgacacagaatggtcaatgcgcatggacgctgatgaagaaattatggaaaacttggcaacagaaattgacgagaaacttccaaatgtcagggaacctgtgaatggtattatcctgcgacgcagagtttattttatggggcgctggatcaagcacggtggtcgctatccggagttgctactccgtattttccggacaggtaaagcttcctgcgagatgaaaatcatggatgaacacatgattctgtccgagggaacaactgttgagttcaagcatgatttgattgataacaatcagaaggatttggaatggtggacagcaaaacataactggtacagcaaccgggaggtgttggatcaccagatgacacttgaaaatgcaatggatgaaagccttgaacaagacggcacgtcgtctggacaagcaaagatgaagcgagtagtaaagaatagtggctattatagactgccgaagttcttccgtgcgcacttgtatttcatctatcgatattacattaagctaggcttcttagatgggccagaaggaaagatatttcatttcttgcaggcatattggtatcgtttcttggtagatgccaagattttcgaatgtgagaaaaatggtactaagatgaagccacagggagatttgaaagcataagaggagaagagcgatgacggatgggcgtagagatattttgattattatgggacgatatcttccgggatataaggacggaggaccagtacgttccattaagaatctgacagattttttgggaaaagaatacaactttaaaattctgacttgtgatagagatcatggagatactgaagcctatccgaacatcaaagttaatggctggaattgtgtaggtaatgcggatgtatattatgttccgccgaaaggatttagccagaagctaatagtggaacttgctaggcaggtagacttggtgtatgtttgcggttgctttaatgattatgcaattaacacattgattgcaaatcgtcttggtaaaattaaagttccggttattgttgctgcgatgggattgttttcgcccaaggaatttcaattaaagtacaaaaagaagaaaacatttacaacaatatttaatatgttaggaatgttcaaaaatatatattggtcagcaacatctgaaatggaaatctcggaaataaaacaccaaataaaggcaactgataagcaattttttattgcagaggatttacctcgaaaagttagtggaactagcattgaaaaagagaaaaaagctggaaatttaaaggttgtttggatttcaagaattgcaccaaagaagaacttaaaatatgcaattgaaatcctgaaaaaaacaaaatcaaatgttgaatttactatatatggtccagcacataccgaagaatattgggaggagtgtaaacaggaacttgctaaacttcccgataatgtgaaatgggactggaaaggaaaccttaattcggagaatgtggtggagacactaaaacaatatcatgtttttctcttcccaaccctaggcgaaaattttggacacgtaattcaggaggcactttcagcggggtgtccatgtattataagcaatcagacaccgtggcaggatttcgaatcgaaaggtgtaggatatgttttttcgttagaaaataaaagcgcctttgtgaatgcagttgagaaatatgctgttatggagcagagtgaatttcaaaaggtgacagaaaaggtacatcagtatgcgatagaggtaagcaataataaagcaaaaaatacaggatatcgagatatttttaatctgaactggaaatgaagaaaggaaaagctatgaagaatgtactgattacaattatatcggtttcatataattgtaaaaaagacgtagaaaaaactattgaatcattgaagacacagacatataaaaactttgagtatcttgtaatagacggaaaaagcaaagatggaacagtggaggaaatagaaaaacacaggaaatgttttaaatatatgacaatattctctgaaccggataaaggtatttatgatgcgatgaataaaggggtgtcaaaagcttctggaaaatatatttttttcttgaattttggtgattgcttctgtaatgaaaatgttttaaatgatatggttcagaagatgaaatcaaatgcagatatttattatggagatattgaaaaaaatggaataatcacagtccaaaagaataaggcaacaattttcaattgtgtatatagggaatatatgatttgccaccagtcaatttttgcaaagcgagaagtgctgtgtcggtatccatttgatatacaatatcggttatgtgcggatagggactggctgactaaaattttgaaaaataattatacagttgagtatgtcaataaagctatttgtaaatatgatataacaggacaaagttcggatccacagaagttcatggaagagtcaaagaaagtatctattaaatacggtggagaaaaagcaaaaatatttataaaggtaaaacgttactttggaaaagtgaaaaatctgcttttaggatggttttaacagttatcagatgaatacaaaaatatcaaatcaaataaaaattgcaagcctaatagccattgcatgcacaatgctaggaaaaatattaggcctgcttcgtgagatgaaaatagcagaagcattgggcgcttcaactagttcggatgcttataatgtggcttatttgctagttataacaatatttggactttttagttccgcatatagtaattcattgatgccaattgcggcagaacaatatacgcaagataaaaagagaatgaataaaacagtcaatgagattgttacgataagtgtaatacttatgctgatagttattggacttgtatatttatttcctcgattctttgtaaagttaatggctgcagggatggatgatgataccattattttggcaggtgaattgattaagattagtgcatgggcattaatatttttagtactgatttcagcgtatgagattgtgatgcggttatacaatagaaatatttacccaacaataatggatttgttgtttcctgtgcctgtattgattgcactgttttgtggggtgacatcaccatatattttaattgcgtgtgttgtgttaggatatgcaattaagtcagtggcattagtaggggggctaaaaatcgttggttttgttccgaaacttgatttttattggaataaccctaaaattaaaagtttctttttgcttatgccaccaatgcttttaagttcaggactattgcaaattaatactcttgtagataatcaagtagcctctggttttgggactggaagtgtcacggcattgtcattagcatcaaaagtaaatggccttgcatacaccgttttttctacatcgttgatgcaaattatttattcaactatgacaaaagcatacatgagaggtgataaaaaagagtttaaggacatcgttgaaaagcaaactaaaatgattttaatgtttattgtgccgtgttttatcattttgtttaattttagcacagagatcatttcaattttgtttgtaaggggaaactatacacaagataatgctgtaatagctggggaaattttaaaagggtatgctcttggtttgccggtatatgtccttcgcgatatatgtatgtatgtttattacgccgcaaaaaaaagcaagtttcctagctttgtaacaggtacatctgtatttattaatgttggattgaatttattgctgtcctatataatgggaataaaaggtgtagcttatgcaacatcgttggcggcaatattttcattagcaatattagctttatttatgaagcaaaaggttgcagaagttagattaatgtcaatgagaaattttggcattattttgatatccgcattaatcacatggaaagttgctagtgcattaaaaaaagtttttgctacatataatgtttggcttaatatgatagcgtttgtatgtatatttgcagtgttttggacaattgctcttgttgttgaattggcgataaaaatgtggaaaaggtacttaaaagtgtaattagatagataatcggtaggaaaggaatagaaagatgcgagttgcagttatacatccgctaaaacatcatgtctattatagtatggcaggtgtcatggaaagtggagcagaagttataggtttgtttggttattacgataagaatgattttttagataaaattgtaagaaaaactaaatggaagaaacaaattgatggttataaatatgaaagaatatcaacgtgtgtaaaaaccaatttttttgttaaagcattgtttttgatggcaaaagctaaaccgaagcagtttcaaaaattgtatgattgggcttttgaaacgtgggcaattcataatctaaaagggatagattgcattcatgttttgcaggattacgagaataaagtaatccgtgtagcaaataagaaaaatattaaaatagtgtatgagcagataacagcttattatatggagcgtttttttgacgataaaagcatcggtgaagatttgaaacagagagaaaatcttcagatagttgactatatattgacggcatcagattttgtaaaaaaatctattctagggatagaagaaaataaaaatgtcgagaataaaattacggtcattccatatggggcaaatacacagcaattttcttataagatacgacagtataaatcgggagagattttgagactcttagttgttgcatcaataagcaaaagaaaaggaatcgaaattcttttagatgccatggagaaattaaaaaatgaacctgttaaactgtctgtgataggtgtttcaacaacaagcaatggacaagagttggttgatcgtatgaactgtatggaaaatgtggaatatataggaaggataccgcatgaacagatttttgagtattttgatattaatgatgtatttatcttgccgtccttagctgaagggtcctcacttagtgtttacgaagcactggcatctggtatgccatgtgttgtaacaagaaatacaggaagcgttgttacagatggtatagatggtattattattgaagttaagaatgcagatagcatagtggtagctgttgagaagtttgtacaaaatccagaattagtttataaaatgagctgcaatgctcaaaatacaatgaataagtattcatggaaaaaatatgagaagaaaatagcttgcttttataagaatcaaataatataagtaggagaataaagtgaaaaaaacgggaaatgcgttaaagatattgtacatactagtaacgctgacaggaattggatattttgtgattgcatataagacagggactttggtgctttggggttatagcgaggatattacgcttaataatggagtttttcctcgtattatcaattacgcaaaagatatatacattgttcttttggcgacatatttgttatttacagaaaataagaattatacaatgcaaaaggactggttttatttgttctttgcaatttttttaggtattgtattagcaattgtaagtggaaatggtttgctatgcgtagtgggaggaattcgtgcatatttgttttcgtttgtagtttattgctattgttggaagaacgaacttgttgagaacttttggacaaaatttttgagaactgtggaaataatgattcttcttcaattggtaggtgttgtcattcaagcaggattagctggtggaggaattcagcttggatcaggtgcctaccgaatgatgggactatttacgaatgcgggaacactggggtatttctcacttggagcagtagtttatctctgctatgtttttttgaataatgaaacattgaaaattgagttttggttgttttcactaatttcaatatttcttgcattagcatctggttcacgtggttgcgttatatatgcagttattataattttggtaaccgtaatggaaaaatcaaggttaaatcaaattggtaagattttggcgattccattaattgcgatagtagttttagcagtagttatatcgaaccttacaacatatgtcggacgtggcaatttgatggaatcaggaactggtcgatttaaggcttggagtgacttatttgaattgaaattttggcaaattatttttggaactggcttaggcgctggaacaaattcagcaagatcattaggcgcaagttcaatcgaaatggatagcagctttactgtttttattgttcagtatggtattttgggggttacattgtttataactcaaatgataaaagtatttcagacagtatatagaaattcaagatacaaatggtatgtgttagccttaataggagtaacagttcttattttgttttctggaagtttgtttgaacaatatacatttgtgattccattgattattgttttttgtagtttgtataaaggcgaagagataggaaattgatgcaatgaatgaaaaagtgaaaatagtattgctgggggatagcattactcagggaataggatcacgtcaaataaattatgaaaaaaagttaaaaagttatttaaatgcaaacggtattgaaagtagtatttttaatttggcattaacaggaacgacaatcaatcatgcttttgaacagatatcaaaaataaggaagattaatccgaattatgtgatcattatgtatggttctgtcgatttacaagtgcgtcccaatatgaatacaaataaatggggaatccttagtataactccgaagcgatataaaaatatcaaaggaatgttaaatccaagaccctttatgtctagcagaaaaagtagatatatactagattgtgcagacaatctttatagaaaaatatggaagcgagttgttattgcaacacaagggacgatgcaatatttgtcagaagaagaatttgagcagaagtatatgagctttttgcatgaagtcaaagattataaagtgatttgtgcatctacgatgtgggttgatgaaaaaatatatacaaaaaaaacaattgaaaattatgaagctgcaaattgtttcttaagcaatttagaaacgaaaagctctaatattgtaggatttgctgatttatataatatgcaaaaagatattatagataaagtggattataacgaaatattttgtaatgatcgcttccatccgaatgaaaacggatatgagaaaatatcgcaagtattgggaaaaattataatttcaaatatgtgttgaaagcattgcgaaggtagcattgacaatgccattaagctaattgttcgataaagtgtttggtggataataaatgtcaaaatctgaaaatgggtatagaaaattgagagaaaatcagtaaaaaaggcataccaaaaagacagataagaaatctgtcaaaaaaataatatttgattaaaagaaactatcgatatccaaaatgaatagcaccaattccgcgtaaaggacgtgaaaattgtcgaaattcacttttgacagcatgaatatatttagctatgagttttataattcgattttccgatgatcgtccacgaataaaatattttctggaaatcttaagtgcagaagaaaatcgacttcatattgatatttgttagtgatacgatgcttcttcttttgattttcctgtattgcttcattggcaagaaatacgccgaagttgtaaagaatcaagttggcataaatttcctgctttaaatactccggtttctttgaatagaagtagagaagtccgttagcatgtttaagatagcgaaaagcaacttctatctgccattgccagtgatagcaggttttgagatcttccagatcaaaagaatacggtaaatttgtaatgatgtactcataagaatcttcagccactttcattttaattacgcgaaattgcataaaataaatatgcttatgattcaaaagctgttggaaatgcgatcaggatcaagatcaaagtaatccatgatttcatcatttgtgttaccttttcccataccaataatcagtcgcatagtatcataaaaagaaagtttaccatggctctgacgcataaaatcatgcccagatctattggcgaagagccaatggtggtttgccatatcagagataataaaattcaatttttcttttacatttgatggataatcgttcataatataaatgtgcctccttagattagagattttactgactgtgaattaaaaatctcttattaatctaagggctgcgttatctggcaggattgtcagataacgcagccgcacattttcaaatgaatgtcaagtaaaaaaagtaataatggaacaaaaagttattacaaaagtgttaaaaaagtaccagccttgaaaacatcaaatgtgagaaaaatggtgtaaataaaggctggtatatatttttgaaaaaaagttattaagttaagatggctaactggcattgcgacaccgctggtctgattccataaagaaaaaatgaataatgtataaaagttttattaatgtacgataagatgtatttagacaaagcattgtaagtacagtaaagaagtagaagaagtgttggtggaatagtctttagatattccggcacttcttctacttgcggattgatgcggagatacgctactggtgcacgtagtaagaacagtaacataacacctgtgaacactagagcattaaaaatttcagcttgcaataatagaattctcatgctaatctaataccacgcagtcattattctgatgaactgcaaaaagatctatgaaccaaatcggtaattattcaataagctcagatttccgagcagataatccgatgacaaaaccaaaaagatgaatattgtttgaagattatgtgatgtagtaaatttctcaaatatctgattttaagagatagttacttccatagaaaactatcttgtgttaagataaatataactttagaatcctcttctttaggcaatcattcattgcacagaagagaggagaattctatgagaaaaaccaggaaaagtgtatcaaccaggaaagcaacatcacagtgccaaacagcgaaagagaagcaggaagattttatcatgcttccaacggtagatttctgttttaaggaactgatgcagaatgataatatccgcaagaacatcattgcagcattattaaatgttccgtccagtgagatagagaatacagaactcatgcctacgattcttagaaaagaatcgaaagatgataagtatggaatcttagatgtccgggtgaaactgaaggacggagaacaaatcgattttgagatgcaggtagaagcctttgattgttgggcaaaccgttctgtgtattatctgagcaagatgtatgcaggtgaaattaaagaaggtgagggatacgattgcttgaagaagtgtatccatgtgagtattcttgcatatgatcatttcccggatgataaagaatgctatcggagaattgcattttgtgatacgaagacaggaaaattgtatacagatcttatggagatgcatattttagaattgtcaaaacttccaccagaagagaagaatgagacaagcctgttgcagtggatgcgctttcttggaggaaaaaccagaaaggattttgaagagatggcaaagaaaaattctgaattggaagaagcatatgatgtattggataaattaagtgcagatgaaaagaagagattagaatacgagacaagacaacgagcaatcagggattacaatataggaatgttaaccgcagaaagacgaggaattgaagctggtcgtaagattggaatggaagaaggagaaaacagaatcaaccaattaattctcgaattatcaaagcttggacgtacagaagatatcgtaaaagcagcagcggataagaaatatcagagaaaattattggaagagtttggtttacagtaggttaccggtggtctgcccccataaagcaaagatatgttctgtaacacgaagataggaaaagagtatacagatcttatggagatgcatatcttagaattgtcaaaacttccgccggaagagaaaaatgagacaagcctgttgcagtggatgcgctttcttggaagaaaaaccagaaaggattttgaagaaatggcaaagaaaaattctgaattggaagaagcatatgatgtgttggataaattaagcgcagatgaaaagaagaggttagaatacgagacaagacaacgagcaatcagagattacaatataggaatgttaaccgcagaaagacgaggaatcgaagctggccgtaagattggaatggaggaaggaagagaaaagggacgaacagaaggagtaaacagaattaaccagttaaatattgaattgtcaaagcttgggcgtacagaagatatattgaaagcggcagttgacaaggaatatcaggaaaagctgttgaaagagtttgagttataaatattaatggagtaaagcatactgaggcagagcagtattgtaatagtgccaggaatataaatagtgcaagagatatcaataatatgtaacggaagtgcaggagagatatgatcacaggagaatatgattatacagatcaggaagtttatgagatgacatgtgagtgccctgcgtattacagttataatggggggtgcaaacactgtattgctggaatatatggaatattgcgaaaggcataaaatattgttattttcccagtttacttcgatgcttgaccgtctggaagaacgctttcaacaggaaaaaatctctttttataaattaacaggaagcactttaaaagagaaaagattacagatggtagaacaatttaacaaggatgataccactgttttctgtatttcactgaaagccggaggaaccggactgaatctcacagtagcagatattgtaatacattatgatctgtggtggaatcttgctgtgcagaatcaggcaacagattgggcgtacagaagatatattgaaagcggtagttaagaatcataagaggcaagagaaaatactattttctcttgcctcttgccatccgtgcagaataccatttttcaaaccatgctgtgaaaagccccatcaatataggaatcagattattcaaaaggataagtacatttccaaacccggctttcttaaacagaaaggtccagattgctgtcagtatatatagcatgccccatgccgcggcaagaatataatttgtcttcataaagagagggttctgatgcgcattttcacccccataattatattttacatatgcagcacataaaggttcttttgtcaggcatgaaagcagccagaagagtccaaatacaagatatccgatgtttgttggaagaactccgtttccggttatatttgccgctgcagaaagtatagcaacagctgccatagagagctgatcccagatgacaaatttatgttttctcataataaacggtactgttgcgaccacaagtagtgttatcacagctccgacttccggatgaatagaaacagcgatccagaacgtaatccatggtatcagcattgtcgtcatagaaggatttttctgtttaattgtattttgagatgttttctctgtttttttgaccacagatgcgcttccgaagattttatcccaatcaatcatcaaggaaaagtcgccggataccgtatacatctgtttccccaatgcttctgcgccaccgatttctccacgggaaatagctgaccatacagtaaaaggcgtatctatgcgagtagttggagaaagacgtccatcagtaaatacttcacttcctgtcttgctaagctgaatctggtaggtgtgatccaaatcggtaaagtgaatctcaagcacgcggtcttttccatcgtaggcatctttattataaagagcggccatttgccgggtaaatacaagatcatcaggttctttttctccggttgttttactgatgccccagctggcatctgccattttttcaaacacatctctggaatataaaagcgtgtggagtattgcatctgtttcttcagagattgttccggtcattgcatattctgagccggcacattttacagtggaaagatattcatctgttctttcagacaattcttttacacggaataattctccctgaccacaaaagatggtcgtataatttcctttgccgagaaaatgatcaaacatccgcaatacactgtcatagtttccaacagcagaataaaagccacaggtggaaatcagaacatgtcttttaccttccatatcatatctggagtcatgacttccgcttccgtatccgttctgttttgaactcataaaaggaaggctcataggaagctgacggtcgatcaaattctttaagatacctgggacattaaaatagtacagtggaaaagaccacagaataagatcagcatcaatcagtttttcaataaccttttgcatatcatccttgatacagcatatgccaggcgttttctgccagcacgcaaagcatcctttacacgcagctatattcattgaagctacatggagttcatcgatggagatgctttcttcatcatccgtacatccatttttaaatccttcaatgaaactgtatgcaagctttaatgaattacttcttttacctttaggactcccattgatcagaagtatcttcatgctttcatccctccgaattcgtacataataagtaactgttcagagccaaccttcaaaatgctacgcattttgaaggtgtggtgtatccgccaaataaaatttcaaaaacagtcttaaaaatgcaagcattttacatctttttttgaaattttgcttggctctgaacagttaacataataataaagtataagaggtgcttacaaaatccgcaacctgaatttcgcaaaattgttgtaaagtattatggaaaagtgatattatgaaactaatatttggaaggttatgtgatgaacatagaaagatgcaaagtagtagttgaggaaagatgaaacaacagaaattattaagtctgatccgtcaggcgatacaagattacaacatgatagaagacggtgacaggattgcagtaggtgtttccggcggcaaggattccctgactctgctttatgcgatgaagctgctgcaggaattttacccgaagaggttcgaattatctgcgattacctgcaacgtaggatttgaagggatggattttacgggcgtagcagagttttgtaagcacctggaggttccttatgagcaggtcgatacagagattgcccggatcgtatttcaggagaataaggatacaagaccgtgttctttgtgtgcaaagcttcggaagggtgcgatgtatcaacagctgggagagcttggaatcaataagatggcatatgcacataataaggatgattttatagagacagcattgatgtcattgatctatgaaggtcggttctatgcattcccaccagtgacagaattgccggaagcgggagtgacggtgatccgtccgatgatgtatgttccggagcaaggtgtagcgcactttgttgcagaccagggaatccgtgtggttaagaatacgtgtccggtagacggttcaacaaaaagagcgtatgcaaaacagttgatggagcagatcaacagggagacgccaggggcgaaggacagaatcatgcatgcgatcgtgaacggaaggttcccggactggccactgtagtgatgggaaagtgattaagaaaatgcattttttacttccctatttcgcctatctgtgttacactaacgaatgagttatttaacttttttgtaacaattacgaaagtgataggctcattgaaaagggaaaacaacatggaaatgcatataactatttgtagagagggatgcagatagttactgttcactcccgtgtcaatcacttcgctgattgacacggaggatgcatgttttggcttgaatgcatctcgccccatcgccaaaggcgatttaaaatggcgagatgcgttgctggtcgcacatcgtgtgaacagtaactgcagatagttaataggaggaattatttatgtgtggaatcgtaggatttacaggaaatcatcaggcagctccgattctgctggacggattgtctaagctggaatacagaggatatgattcagcaggtcttgcagtgcgtgacggagagcatcttgcacaggttgttaaggcgaagggacgtctgagtaatctttcagagaagacagacagtggtaaggcactcaagggaacttgcggtatcggtcatacacgctgggcgactcacggtgagccaagtcagatcaatgcacatccgcatgtatccggaaactgtgagagaagtggatccggtacagttgagtctgaggttgtcggagtacataacggtattatcgaaaactatacagagttgaaagaaaagctgttaaagcatggttatacattctacagtgatacagatacagaagtagtgatcaaactggttgactactattataagaaatataacttaggaccgatcgatgcgattgccaagactatggttcgtgtacgtggttcttatgcacttgagctgatgttcaaggattatccgggagagatctgggttgccagaaaagacagcccaatgatcatcggtattgcagatggcgagacttatgttgcatctgatgtaccggcaatcctgaaatacacaagaaatgtatactatatcggaaaccttgagtttgcaaagcttgttccgggagaggctcatttctatgatcttaatggtgacgagatcgagaaagagacaacagagatcaaatgggatgcagaggcagcagagaaggccggtttcgagcatttcatgatgaaagagatctatgagcagccgaaagcaatccgtgatactctgaattctgttgtgaaagacggagtgatcgactttacggatattgatattacagaggaagagattaagaaatacagccagatttacattgttgcgtgcggttctgcatggcatgtaggagttgaggctcagtatgtgatcgaggagctggctcagattccggttcgagtagagcttgcatctgagttccgttaccgtgagatgccgcttgtgaaggatggtctggttatcgtggtcagccagtccggagagaccgcagatacattggcagctatgcgtatggcgaaagataaaggacttgctacacttgcagttgtaaatgtaatcggaagcagtattgcccgtgaggcagataaggtgttctatacactggcaggaccggagatttcggttgctacaacaaagggatatagcgcacagcttgtagctcttgattgtattgcagttcagttcgcgaaggtgaaagggctgatcacagatgagcagtacagctactatatttctgaacttcagacaattccggagaagatagaaaaggttcttcaggataaggagagaatccagtggttcgcagccaaatatgcgaatgcacatgatgttttctttgtaggccgtggagttgactatgcagtgtgtctggaaggaagtttgaaattgaaagagatttcttatattcattctgaggcttatgccgcaggtgagttaaagcatggaacaatcagtctgatcgaggacaatattctcgtaatcggagttctgacacagagcaagctgtatgagaagacagtcagcaatatgatggaatgtaagagtcgtggcgcatatctgatgggtgtgacaaactatggcaattatgagatggaagacaaggtagactttacagtctatgttccgaaggtggatgaacactttatgggaagcctcgcagtgattccgctgcagttacttggatattatgtaagtgttgcaaagggacttgatgtagataagccgagaaaccttgcaaagagtgtaacagtagaataagaatatgatgaatcaggcaggtcgggaaaatgaatccgtcctgcctgattttggcaagagccagaaacagcaccgcatcttcccactgttctggctcttgttttatataggaattattatctaggcatatcccactttgtatgatctgtatgaagcagcatatgagatttgtgtgacaatggtttctcaaggaaatcgttgtacaatttcataacatcctgattctcatgggagaaacggatcttggcgttcttgtcaaggaagtagaggtttgcaccgcgtgtgtgtgcaagttcttcgccgtcgtggatcggctggccgcctccaccgacgcatccgcctggacaggccataacttccacaaagtcgtagtgtacttcaccgtgttcaattgcttcaagcagtttgcgtacatttccaagaccactgacaacagcagcgcggatcgtagcatcaccgatctggacttcagcttctacaacacccgtctcaaaggatggactgcggacaatcttaaatgcatccggatccgggttacgtcctgttacaagatagtgtgcggaacgaagtgcagcttccataacaccgccggtagcaccgaagataacaccggcaccggaccactctttcataagtggatcacattcgcggtctttcaggctctttggatcaatatgcgcagcacggatcattcttgtcagctctcttgtagtgagaactgtgtcaatgtcatgtccggcatactcgccgtagaaaagttccatgttgcgttcaccttttttcgctacgcaaggcatgacagatacggtgtaaatgtcttccggagcgacaccgatggactgtgcaaaataagtcttcataacagcaccgaacatctgctgtggtgacttggctgtggacagctgtggtaccagatgcgggtactgtgatttgatgaaacggatccagccagggcagcaggaagtgaacatcggacgcagctttaattctcctttggagaaacgctgaaggaattcatttccttcttccatgatcgtaaggtcagcggagaaagaagtatcgaagacgtaatctacgccgatctttttcaaggcatccatgatctttccgattgttgcttcttctctggacaggccgagagcttctccccatgcggcacggactgccggagcaacctgtgcaaccaccactttcttcttgtcagcaatcgcactccatacatcctctgtatcatcacgctcacgaagtgcgccgacaggacaatgagtgatacactgtccgcagagagaacaggagacttcattgatctttttatttccgtttacattgatcgttgttcttgaacctgtacttgtaacatcccagatgttcagtccctggatcttgtcacaaatctggatacagcgcatacatttgatacatttgcgtgaatcacggatgagtgggaatgtcttgtcccaaggtgtatcttcaaagcgttctttgaacggaagatcaatcaggttcagatcatttgcaacctgctgaagtgtacagttcccgcttctgacacaggttgcacatttgcagtcatgctgggaaaggataagctgtacagtctgtcttcttgcaatgcgtaccttcgggctgttcgtgtagatcaccatgccttcggttacaacgttattacaggatgtgaccagacgatctttcccttcaatttcaacaacacagacacggcatgccgcaatctcgttgatatctttcaaataacataatttcggaatcggagttccaagttttgccgcagcttccatgatagtagttccggaaggtacggatattttctgattatcaattgtaatatttaccatttttctttccgacctcctttaaagataccataaccgaaatgatcgcagcgcaggcatctgtgggattcctgttttgcttcggcttctgtcatacagttttcaacgccttcaaagtcacagacacggctgcatgcttcgcgttctgtcagttcaactcttccgcaaggttcgcggtcgcttaagcgaggttccggaatctcaacatcacagctgatgatatggtggaaaccaagatattcatcgatattggcagcaacaacctttgcagcggcaattgccttgattacggaagcaggaccggatgcacagtctccaccggcgaatacgccagggatgttgtcgaaaccgccataacgctctgtcatgatcttaccgcgggaaaccggaacaccggcttctgcgaagtgttcggattcgatatcctgtccgattgcaacgatgagtgtctgacaagggataaggaaatcttcttcacctgtcggacagacacttgcacgcccatctttgatcttgctgatcatctgtggtgtgacgtagatacctgaaacgtgtccgttctcatcagtctcgattctggatggcgctttcagtgtgagtacttcaattccctctgcaactgcaccttcgatctcagccggaagagcagtcatatctgcagtacggcgtctgtaaacgatacttacttttttagcaccgagacgttttgctgtgcggacggcgtccatggaaacgttaccgccaccgatgacagcaacttcctgtccggtgagatcagggctcttgtcttccccaacatcacgaaggaaggacacagcagagattacgccttttgcctgttcgccttcgataccaagtttcttatcagtgcttgcaccgatggaaataagaacagcatcatattcctggcggagactctgaattgtgatatctttaccaatacgttttccaaattctacctgaactcctgtctcaaggattgcctgaatgtcttcgtcaagacgatctttcggaagtctgtagttcgggattccatagcggagcattccgccgagctttggaagcatctcgaatacggttgtctgatgtcccatcaactgcaagtagtaagcagcactgagtccaccaggtccaccgcctacgacagcgatacgctttccagtggaaggtgcgcattccggtggtggaaccttgcctgcataatcagcggccattcgtttcagtccacggatattgatggcatcatctacgatatttctacggcagcgggcctcacaaggatgctcacaaataaaaccgcaggttgtcgggaacggattatccttacggatcagacggattgcgtcagcgtaacggccctctccggtcagtgcgatatatccagggatatcaacatgcgcaggacagagagaaacgcaaggtacaggctgtgtatagtggcaggtacagcgtccctgacggacatgttcttcataatcttcgcgacagtctcttaagctcttatgtaccatggcaccggcttcatatccgatcggacagtcagatccttcgcggatggattcagacaatgtgtcaatcagatcaagtgtctccattgtagcagtaccgttcataacatctgtcagaaggttcttcaactgccacagcccaacgcggcacggggtacattttccacaggattgtgtctgacacatctcgatgaatgcacgagtcatgtcaaccggacataatcccggagggctggattcaattctgcgttccagatctttgtacagctcttcaacgacgagctggcctttgtctggacctgggatttcaagtctactcattttaaacctctccttttaccataacgttcattactgactgattttaaaataggaaatgtatttgaaaaaacctatcttcaaaccagtaaagtttcatttagtaatattctacaaataaatctaaaaattatcaagaaaagttaaaaaaatgacaaccttgttatttattatacaaacaacaaggttgtcaaaaataaacaaaaatattctaaaaaatattgagaaacagctaaaaaaatttaattcatatagcggtagcaacgaaaataataacagagcgttcacctaaaaatattttagattctaccgtaggcattgaatttttgtgaaaaaactgacatttaggatcgccggtgttgaccgcaactttccatttgtaatgttcaggaagttccggcagagtgagtgtgaccggaaaccatccggaatttacagccagataaacaaggtcttctttttgggttgcttcattatagcctgcgaattgtacacagacaacatggctgtcaccggagaaatttgtctcatccggagtgggcccatgcgtgctcattgccggaacaccaagatagcttggctcgagatccttacggatgacagggtgatctttgcggaactggatcatatattgaaagaaatcgaacagatccttattttttttgaggagactccagtccagccaggagatcaggttatcctggcaataagggttattatttccgtaacgtgtgtctgcgaattcatcaccggagaggaacattggagttccgcggctgcaaagcagaacggcacaggcatttttcatcagtcgtttacgaagtgccagaatggcagaatcatctgtttcgccttctacgccacagttccagctgttattgtcgtcagctccgtcagtgttcccccaaccgttggcttcattatgcttctggttataactgtacagatcataaagcgtgaatccatcatgacaggtgagaaagttgatggaagcatttccacctcggtaagcaggatcgtacagatcaggagaacctgtgattcttgctgcagcagtctgggcaaggaagtcatctccttttaaaaagcggcgcatatcatcacggtagcgcccattccattcagcccagcgcttccaggaagggaaagaaccgacctgataaagtccgccggcatcccatgcttcagcgatcagttttacatttccaaggatcgagtcgaatgcaaggcttcgtagaagcggtggctggcttagaggggttccgtcatcatttcgtccaagaatggaagcaagatcaaaacggaatccgtctacacggtattcgatgacccagtaacgcagacactccaaaatcatgtctcgtacaacagggtgattgcagttcagtgtatttccacatccgctgaaattataataatgtccgtccggagtcaacatatagtaaatgttgttgtcaaagcctttgaaagaaaagcacggaccgaattcatttccctcagccgtgtggttgaagacgacatcgaggatcacttctatgccattgtcatggagatctttgatcagtgtcttgagttccagtccttcgtggttatattccatagaagaacagtagcttgtatttggtgcaaagaaactgaccggattatatccccagaaatcaataagttcattttcatcaatcaatcgtacatcacgcatctcatcaaattcgaagattggcattagttcaacagcattgactccaagttctttcaaataaggaatcttttcgcgcaggccttcgaatgtaccgtggtgcttaacaccggaactttcatccatggtaaatccgcggacgtgtagctcgtagatgatcaagtcttccataggaatagaatggtgacgctggtcaccccagtcaaagttggattgtaccacacgggcacgataaccatgctgggcgttatttacatgcccccactggctctgtccggtgacggcgcgcgcataaggatccagcaggattttgtttttatcaaaacggagtcctttcttttcatcataaggaccatccaatcgataggcgtactcaaattcttcgatatccagatcaaagacgatcatggaatagcagaatccgatcctgtaactttccggaaatggaatcacggcgtaaggttcttcggctttgcggtgaaatagcagaagctcgcaggaggtagctccgtgtgtatgaatcgtaaagttgacaccacccgggatagcgactgcaccaaattcacggaaaaagccgggacggatctggaatccattgacggtatcgattggcttgagctgctcggatattactggcatataggaaaactcctttctaattgtattcaagttagaatgaattaagaattaacataacaattaacataagtataacacttagaaaaataaaagcataggttcagcctatcattctgtgagaaaatgtgctacaatgataccactatttatttgtagaaaagaggttatggtattatggcagaagagcagaaaacagcaggatgttcagaggaatcctgcgccagctgtgccagtgcaggaacatgcacaagtaagaaagttgatatgcatgaaccgatgaacatgtattcatctattaaaaaagtgatcggcgttgtcagtggaaagggtggcgttggtaagtcactcgtgacagcatcccttgcaagaatgatgagagcaaaaggatataatgttggtatcatggatgcagatattacaggtccatctatcccaaagatgtatggacttcatgagatggcagtaggaactgagcagggaattcttccatgtgaagcagcagatggaacaaagatcatgtctgtcaatcttcttttggaagacgaggaagcaccggttatctggaggggaccagtgatcgcaggtgttgtaaagcagttctggacagatgttatgtggggagatcttgattatctcttcgttgatatgccacctggaacaggtgatgttccgttgacagtattccagtctcttccggttgacggcgttgtgatcgttacatctccgcaggatcttgtacagatgatcgtgaagaaggcatatggaatggcgaagcagatgaacattccggttcttggaattgttgagaattacagctatgtgaagtgtccggattgtggcaaagagattaaagtatttggagaaagccacattgatgagattgcagaagatcttaatgttccggttctcggaaagatgccacttgacccggcaatcgcgcagatggttgaggaagagaagttttctgaggcagagaatccatatctggaaggattcgaactgtaaagcaagttgagtgtatgtaatgggagtcatggaagacaaggttgggggatcttgtctttcgtggcttttttacgcgagcaacgagcaaagtccgtgctcctaaaagaataatagaaaagcacaaattataaatcacacaggaggaattaacacatgataggcgaaagaatagaattatggcacaaagaagaatatcattaccctgcggcgcatggttttatcccgattatggtcagctatattcatgaggatgagctgatgcatccggcgatgctggttgttccgggaggcggttacagacttgtatcgccttcggaagcacatctggttgctatggaattttatcaggctggttataatgtgttcgtccttgaatatacagtgaatccactggatgaagcaccattaaagcttcagccgctgaaagatatttccagagcaatgcgaatcatccgttttcgttcggagcagttacatattttgtcagatcagattgtggtctgtggattttcagccggaggacatctatgtgcgagtctgtgtgtgcatggagcggatatcgaggacccggatgaaaaatatcagaagttttcaaaccgtccggatgcggcagtgctgtcttatccggtaattacttcaggaaaatatgctcacagagattcttttgtagctcttttagggaagaatccaacaaagaaagagttagaatatatgtcaattgaaaagtatgtaacaaaagaaataccaccatgtttcatctggcagacagcaacagatggaaccgttccggtgcagaacagctatcttttagcacagaaatgtctggaagaaggagttccatttgcgcaccatgtattttcagaaggcgtgcatggtatgtctgttgcaacagaggattggctggaacgcagagggagagaaccttatacacaggagcaactccgtatgctggcagaagcaatccttgcgggagaaacttcatttccaaaggaaatgggagaagaactgcttgtgaaaaatggaattggaagaacacagccaccgaaatggacagtagagcaaaaagaagagatacgaaggacactgaaagaagtacagagttggccaaaactggcagaggattggctggagaaaataattaattacaaaggagaaacacgatgagaattctattgatccgtcacggagatccggattatgtaaatgacacattaacagaaaaaggaagacgtgaagcggcactgcttgcaaaacgtgcagtatctatgaatatgggggaatgctataagtctccacttggaagagcgaaggatacggcgactccatgtcttgaggtaactggaaaaacagcagaaatattggattggctgcaagagttcccggcgcaggttgatttgaataaaaatccggaacttgaaaaagcatatcccgatgtgaaaaaagaaggtgagcatttcctgcctagaattgcatgggatatggttccggggtattggacagaacatgaagcttatatggataaaaatgcatggcgtgaaacagaagtggcgaaaaattctgatcttgtagaagtatacgatcatgtgattgaagaatttgatcgctttctcgcagagcatggatatgtaagagaaggggcgcattatcgtgtggagaaagaaagtgatgagacagtgacatttttctgccatttcggaatcagctgcgtgctgttgtcccatttatggaatgtatcaccattcgtgctttggcattgccttgcgcttgcaccgacttctgtgacagaagtagtaacagaagagagagaacagggaacggcatatttccgaggattgaaagtaggagatatctcacatctctatgcaggtggagaagaaccgtccttcgcagcaagattctgtgagacatatagcaacaaggagcagagacattaaaatcaaatgtctctgctccttgctttatggattttggtattattaaaccactttctgataagcaattcgttctgttccatcctcaacatatacgattccgcaatatttgaatccattcttatctaacagatgctgcattacgatattgtcccggtgtgtatcaatacggatattgccgcattgttccaaagcccagttcaggcagaaggacgcagcaccttttacatttccggtggaagtgatgcggtggacgactccgtaacgggagttgttgatccagtccccatcgtagatgcgcatgtaagtcggatcagccccttctttataatagaaagtagcaatgatctgatcctgttctgtgcagacataactgttcccctcagtgatgtcatccagaattaactgtggagaaggataattgttttcccattgagaagcatttccgtgagttgccatgaatctgcgtgcatgttcgtacatcttaagaagtacttcaagctcttctggttttgtctttctgatttccataatattcctctttcataaactaaatatagatacgctaatgcactattatatcaaaaaacagaacgtaactccattgacaaaaatatagagaaaacatgaaacgaaatcgttatcatagaggaaaagtacctagatgattttcgggaagaaaagcaggctgtttatttgcatatgaatccgactgtacacatggggaaaatgttctttttacggtacatttttactgtactaaagtttgtacaattccccgtaaaatgggcgctttttcgtatattttgtactaaatcgaatacaaagcgatttccgatatttattctcgattttacgcttgtcatttatttaacacggtgttatactatgcccgtaaaacaattacaaaactattttaggagagaatataggaggatttttcaatggctaattttgagcagtgggctggcttcaagggaagaaaatggacacactctgtagacgtgcgtgatttcatccaggagaactacacaccatatgaaggtgatgaggcattccttgagggaccaacagaagcaacagacaaattatggggaagactgcaggagcttcagaaagaagaaagagctaagggcggagttcttgacatggagacagaggttgtttccggtctgacagcatatggcccgggatatatcgatgagagcatgaaagaccttgagcagattgttggtttgcagacagacaagccgctgaagagagcattcatgccttatggtggaatcaagatggcagagcaggcttgtacaacatacggataccagccaagcgagaaactgcatgagatcttcacaaaatatcataaaacacacaaccagggagtattcgacatctacacaccagagatgaagaaagctcgtcataacaagattattacaggacttccggatacatacggacgtggacgtatcgtaggtgactaccgtcgtgttgcactgtatggtatcgacttcctgatcgagagaaaacagtatgacttcgagcgttatgcaagacacggcatgaagggtgaggatttccgtcttcgtgaagagcttgcagatcagatcaaagctctgaaagaaatgaaagaaatggctgcagcttacggatttgatatttcacagccggctaaggatgctcatgaagcagctcagtggctgtacttcggatatcttgcagcaatcaagactcagaatggtgcagctatgtctgtaggacgtatctctacattccttgatatctatatcgagagagacctgaaggctggaaagatcacagagaaggaagctcaggagatcatcgaccacatggtaatgaaattccgtatggttaagttcgcaagaatcccatcttacaaccagctgttctcaggagacccgacatgggcaacacttgaggttggtggacttggacaggacggacgttctatggtaacaaagaacgactatcgtttcctccacacactgaacaacatgggaccttcaccagagccgaacctgacagttctttattcttcaagactgccagagaacttcaagaagttcgcttccctgatttctgtaacaacaagttctatccagtatgagaacgatgatgttatgcgtccggtatggggcgatgactacagcatctgctgctgtgtatctgctacagagacaggtaaagagatgcagttcttcggagctcgtgcaaaccttgctaagtgtcttctttacgctatcaacggtggtatcgatgagaagaacaaagtacaggtaggaccggcttaccagccaattacttccgagtaccttgattacgatgaagtaatggagaaatatgaccagatgatggagtggctgtccaagctgtatgttgatacactgaacatgatccactacatgcatgataaatactactatgaggcagctcagatgtccctgatcgacacagacgttaaacgttctttcgcaacaggtattgctggattctcacatgtagttgactccctgagcgctatcaaatacgctaaggttaaagttgtccgtgacgaagatggtcttgcaacagacttcgagattgagggagacttcccaagatacggtaacgatgatgaccgtgcagatgagattgctgtatggcttctgaagaaattcatgcacaaactgaacaagtgccatacatacagacattctgtaccgacaacatctatccttacaattacatctaacgttgtatatggtaaggctacaggatctcttccggacggaagaaaggctggagagccactttcaccaggagctaacccgtcttacggcgcagagcagagcggacttcttgcttctcttaactctgttgctaagcttccttacgagcttgcacttgacggaatctctaatacacagacaatcaacccaggtgcacttggacattctgatgaagagcgtaaagagaaccttgctcacgtacttgacggatacttcgatcagggagcacatcacctgaacgtaaacgtatttggtgttgagaagctgaaagatgctatggagcacccagagaaacctgagtacgctaacttcacaatccgtgtatcaggatacgctgttaagtttatcgaccttactcgtgagcagcagcttgacgttatcgcaagaacttgccatgaccacatgtaatttgtaattcagccaggccatgcgaagacagacagtaaaaggatcgtgtaagcttgcttacaaagagactctttactggctggcttcatagggcgcagccctacagcgagaagaagcggagcggattcgagctgggagagcaatggcgtatagaaatgcataaataagcagaaactatatcaggacgcagtcatttcaccatgctgcgtccttttttcacaagacctgcaattataaagaaatgccagaagacaaatctgaaggttgcagaagaatggcaggaaactgccggaaaaagaaggagaaatatatgtcagaagtaaaaggatacattcactcaacagaaagcttcggttccgttgacggacctggcgtacgctttatcatttttgtaagcggatgtccaatgcgctgccagttctgccacaacccggacacatggaagatgcaggacggcgaactgaagacaacagatgaactgcttaagacagcacttcgctataaaagctactggaaagataaaggtggtatcacagtcagcggtggagagccactgatgcagatggatttcctgattgaccttttcaagaaagcgaaagaacagggagttcataccaatattgatacaagcggagctgtatttacaaaggaagaaccattctttggtaaactgcaggaactgctgaaatacacagatatgctgatgcttgacatcaaacacattgataatgagcagcataagattctcacgggacagagcaacaagaatattcttgagtttgcacgttatctgtctgatatcaagaaaccaatctggatccgtcacgtactcgttccggagcgcagtgacaaggatgagtacctggagagacttcatgatttcatcgagacactggataatgtagagcgtgttgaagttcttccatatcatacacttggtgcatataagtggaaagaacttggatatgattacaagttagagggaatcgatcctccgacacaggagagaattgagaatgcaaaccgtattcttgagacagcgaaatatttaaaataaggtaaaaaaagaactctgttatgagatgtatgaatcaatacattcgtaacagagttcttcttttataaataccttgcttaaaattttctcagaaagaaaaaagtcacgatacacacgattgcttcggtaacaggcagacagagccagatacctgtcattccaaaaaatgcggcaagcaggaaagcaatcggcaagatcagtacaaggccacgcaagatagagatgatgaatcccggtaccggctgatcagaagcacttaaataagtcgctgacaccatattgatgcctgaaaagaacaggcttacaaagtaaatgcgcattccttctgctgccattgaagtaagcagcggattcttgtctttattaaataagtcagcaatcggaacagcaaagacaaacacaaccagataggcgatgaaagccataagtaatgcagtgcttaatgcataacgtcttacctggtggcgtacaggagctccatttttaccagggtggctgctgacaatcggctggatgccctgcccgattccggtaaagatcgccacaagtacgagtgcgatattagcaaggatactgtatgccgcaagtccggtcgttccgctgaacttcagcgtcagcatgttaaagacaagaattacgatgccggaagataattcagcgacaagagaagaaactccaagccggcagatatctatagcagttttcagatgtatccctgtttttaccagatgaaactgattcttctttttccagaaatgcatggacagaatactcattccaaccagtggagcggttgcagtagccagtgcagctccggtcatgccaagctgcataggatagatgaaaatgtaatccagcacaatatttgtcagacttccaacaagcattgcagtcattgaaagtcgcggttctccatcatttctgacaaaacagttcaacagattgttgcacaaaaacagcggagaaaacatgagcaggatgctgatatatggaattgcatgcggtaatgtagttccgtcggctccgagtaagacacaaagaggtcttgcaaaaaacagtccgatgctgaaaaagaacagcatagctacaaatgcaagctgaagtgcctgggtgaagatcgtgcggtgaatctcactgtcagctctgccggaggaaagcgagtatcgcgcagcagcacccataccgatcatcagccctgttccgtttaacaagctgaaagcaggaagaaccagattaagtgcagcaatcgcatccgagccgattccccgggcaacaaaaaatgtatcggcaaggatataacaagaatatccgatcatgccgagtacatttgctgagacatatttaacaaagagtggaaatacatgttcccgggcagttaaagtaactgagttggatgacataataaaaaattcctttctgtattttcagaatgcgtataataccatagaattttgagaaaatcaaatctttctttcttatgaaaatagaggtaaaataaaaatgttatgtctacggtatttacaatccccgaaaagatggttttactcattataacatagaacgaagaaaggaaacatatatgaataaaaaagaagtacttgagatccgtaagcagttctcaccgaaaaactgtgcgattacgaaaatctgtggctgctatgtggattatgagaagaataaaaagatggagtcaaaagacgcatttctcgcacttccggaggaagaagcatttaagtattttgatatttttaagaagacgctttccggaagtatcggaaagaatatgctgaatatggagtttccactggatgcagagatgccgggcggaacacaggaatttcttctgaagcttcgtgacagccgtctcgaagacgatatgcttctggaagaattctatgacaaagttattgcaacgtatgagtatgcggagaattattacattattttgatccatgcagcatacgatgttcctggaagaacatccgatgatcttgagatggatgatgcttcagatgaagtatatcagcatatcctgatgagcatctgtccggtcagtctgtcaaaggcagggcttagctataacgcggaagagaactgtattcaggacagaatccgtgactggatcgttgataagccggacaaaggattcctcttcccggcattcaacgacagaagtactgatcttcacagtgtgctttattacacgaagaaatcagaagatcttcagccggagatgatcgaccagcttcttggtgcgaagatgccgatgtctgcggacacacagaaagagacattccagatgattattgaagatacattgggagaagatggtgattacgagactgtccgtaacattcacgagacattaaatgatatgatcgaagaacacaaagaagaaccggatccgctgacattggataaaacggacgtgaagaagattttcgagcagagcggtgtgccgaatgagaagatggagaactttgagaagaacttcgaagaaaatgcaggtgagaaagcaacgcttctggcaagtaatatcgcagagacaagaaagttcaatatcgagacaccggatgttgtgatcaaagtaaatccggacagaatggatcttgtagagacaagaatgatcgacggaagacagtgccttgtgattcctgtggatgaccacattgaggtcaatgggatcaatgtcagaacgatgaaggtaaaaggcgttgcaggaccgaaagcaggtggttctggtgaagctgtggaaaaagcagaggatgatgttgttccgtttgatgaagattaattgacggggaatgaaatagagaaaacgtacaaagaggattcctgcctgaaaatatttccctttatttaaaatgaaatattttcaggagggaatcctctttacagtcttctttgaataaaaacaggtagaagaatagtaacattagatgattgtatactgcatcagttcatagtgcagtttacaaccttctacaatctcggccgggagcagtgctctggctacgagttttaactcttcatccggaagatcaactcttcttaagtgtgcataatctccgtcgatttgttctacgatataatcacatactaacattttaaaatctccttttaaacacgatatagtattagaaatattttatcatgaattataaaaaagtaaagaataaaggtgagttcgtaagcggacgatgtgatgagaagataaaaagtgccaaaaacagacagttgtagatttatccttcgtgtattataatattgcataccgactaaacaggtctgagaaaggttggagattacagacatctgtgaattaggaccgaaaaatagtattggaggattctttttatgaaaaaatcgagttttttcaaaagtctgccatttaaacttctggtaggtgttgtgatcggaattcttgccggacttgctcttaatgcaaatgacgggacaggtttgacaaatgcaattctgaacattattgtaactttgaaatatgttctgggacagattatttcattctgcgttccgctgatcatcattggatttatcgcaccgtccattacaaagatgggaaataatgcatcgagattacttctacttgcagtatgtattgcatatgtatcctctgttggggctgcgttattctctacagcggcaggatatgcgctgatcccgcatctttctattgtgacagatgtagatggactgaaagaactgccggagatggtgtttgaactttctatcccacagatcatgccggttatgagtgcacttgtattttctattatgatcggacttgcagcggcatggaataaggcaaaattaatcacaggaatgttggaagaattccagaagatcgtgctttccatcgtgtcaaggattttgattccaatccttccgttatttattggattcacattttgttctctggcgtatgaaggatccattacaaaacagcttccggtattccttaaggttattattattgttatgatcggacattatatctggatggcacttctttatacaatcgccggcgtttattcaggaaagaatccactggaggttgtgaagcattacggaccggcatatctgacagccgttggaacaatgtcttccgcagcaacacttggagttgctctgcagtgtgcaggaaaggcgaaaccattaagaaaagatatggtacagtttggaattccgttatttgctaatatccatctgtgtggatctgtactcacagaagtgttcttctgtatgacaatctcacagattctgtatggaaaacttccgtcaattccaacaatgcttctgttttgtatacttcttggagtatttgcaatcggtgcaccgggagttccgggaggaacagttatggcatcccttggacttatcacaggagtccttctgtttgatgatgcgggaacagcactgatgcttacaattttcgcacttcaggatagttttggaacagcttgtaatgtgaccggggacggagcacttacgttgattcttacaggatatgcggaaagacataagattccggagaagtcagatgagatgctgaatattgaattttaataattgattttaagggcaactattatagttgtccttatttctattaaacggaaaatcaaaaagaggttgtaattttcggaaatatatgttagcctaaattcacgcagttcttattcttatgaacagcaaagatatctattaaccaatcggtaattatttccatagttcagtattcgaacaaataatccgataacaaaacataagacgaatattgtatgaatgataactgaaagtttattaaaggatcaggtttaaaagttctgcttttctgaaaaaaaaacctatgttacaataaatttggataaagaattctttccttcatataagtgtttgtcttacaaaaacgaaaaggagaattcttatgaaagaaaacccaagaaaagtatctaaaagtgcaattaaaagcgaaaatgcattaaatgaaaaagaagatttcattatgttgccaacagttgatttttgctttaaagagttgatgcaaaatgaaaatgtgagaaaaggaattattgcagctatattaaacaggcgtccagatgaaattgtaaatactgagcttctccccacaatcctaagaaaggattcggaagatgataagtatggaattctagatgttcgggtgcagttagataatgaagtacagattgattttgaaatgcaggtggtttattatgatttttgggcgaatcgtacaatttattatttgagtaagatgtatacggaacagatacgagaaggtgatagctatgatagattacagaaatgtattcaagtaagtattcttgctcatgtattatttcaagaagatgatgagtgttatcgacgtatttcgttttgtgatgtaaagacggggaaggaatatacagatctgatggaaatgcatattttggaactgcccaaattaccgccggaacaaaagagtgaaacagatttaatgcagtggatgcgctttttgaatggtaaacgcagggaggattttgagaaaatggctaagaagaattcttgttttgaagaagcgtataaagaattggacaaattaagtgcggacgagaaaaaacgtcttgaatatgaagcaagacagaaagcaatcagagatcgtgatatattgatcaagacgggagaaaatcgtggacgtaaagaaattattttatcaatgattgaagcgggactaccactggaacagattgcggaaatcacgaaagaaactctggaaacgatacaagaattaaagaaaaagatgggatgatggtaaaagggcagctattatagttgtcctttctttttgccaaaacattgaattttagtactattctgtggtacaatcgtttggtataaaaaaagcaatcgtctggttgatatttgcaaggggaatgtggatatcaacagcattttcagattgagaggtgaaaaaaatgggatttacacattttgatgaaaaaggaaaagccattatggtggatgtgacggagaagcaggacacagtccgggaagcaaccgccacaggaaagatcacggtgaatgaagaagtgttccgtgctgtcaaagaaggaactgcaggcaaaggggatgtgcttggagttgcgacaacagcagggattatgggagcaaagaggacatcggatctgattccgatgtgtcacattcttccgatcacaaagtgtaaggtagagttcgagatggttgagagtgaacttgcaatttattgtaattgtacggtacgtgtgaccgggaagacaggcgttgagatggaagctctgacaggagcaagcgtagcacttttgacagtttacgatatgtgcaaagcgatggataaaaagatggagattggggaaatctatctggtcagaaagagcggtggcaagagtgggctgatcaacaatggatataagaaggaaagaaaagaaggcgaaaagtaaagtggaaaagaaagaacaaagatggaaagcagcggtagtgacactgagtgataaaggatatgcaggagagcgggaggacaagagtggaccgcttctttgcggtatgttagaagaggcaggatatgaagtaacagaagtaaggcttcttccggacgagcagaagatgatcgaacagtgcctctgcgaacttgcagatgagaaaaaagtggatctgatcgcaacaaccggaggaacaggttttgcaccgcgtgactgcacaccggaagcgacacttgccgtggcgacaaagaatgcacctggaattgcagaggcgatgagactggcttcacttcaggtaacaccaagagctatgcttagccgtggcgcttctgtgatccgtaatcagacattgatcattaattttccgggaagtccgaaggccgtaaaagagaatctagaagcagtacttccatctttggaacatggtcttgcaattcttacaggaaatgcaagtgagtgtggaaaaccagttcctgaaggaaagtaaaacagtaatgtaagagataaataatatgaggtatgtaagagatgatcgatcaatatggaagaacaatagaatatctgcgtatctctgtgacggatcgttgtaatctgcgctgtgtctactgcatgccggaagagggcattgagcagctgccgcatgagcagattctgacttttgatgagattgagagagtatgccggatcagtacagaacttgggatttcaaagattaaactgaccggtggggaaccgttggtgagaaaaggattgccggacttattggggaaaattaagagaatttcggggatcgaacaggtgacattgacaacaaacggaatccttctgaaaaatcagttggatgagttgatgcgtcaggggctggatgcagtgaatatcagtattgatacattggatgaaacgtgttaccatacagtgacaagatgtggggaattaaatcaggcactggaaggactgcaggcagcactcgaatatccgaatctgcgtgtgaagttaaattgtgtgccgatgaatcagtcagaagaagagtatattcagatggcagagtatgcaaaggagcatccgttagaggttcgttttatagaaatgatgccgatcgggatgggaaaagcctgtcagggaaaatcaagagatgagcttctggaacttttagagaaagcatttggaaacgctgaaccgtatgaaaaacatttggggaatggtccggcagagtatgtgagcttttcgggattccagggaagaattggatttattagtgcagtgagtcacaagttttgcgattcctgcaaccggatccggctcacagcggaaggatatctgaaactctgtctacagtatgaaagtggaattgatttaagaaaacttttaagaagtggtgcaacggatgaagaagtgaaagaagcaatgcgtcaggcaatctggaaaaaaccggcctgtcacaatttctcggatgagcgaagagatgaagaagttggtcagaaaaaagaacatcgggccatgtacggaatcggtggttagatcagtaatgaaataaaatcgttactgttcactcccgtgtcaatcactccgctgattgacacggaggatgcgtgttttgacttgaatgcatctcgccctatcgccaaaggcgatttaaaatggcgagatgcgttgctggtcacacatcgtgtgaacagtaacataaaatcagtaacagaaaagtaacagtgcagattatgcacaaaaattataaaagtgaaaaagtaatttgagaggtatagaaaaatgggaaaagtaatagcaatttgtacaagtccggcaaagggaacacagaagacaagaatcgaggaaggcacatttatcgaagattttggtctggaaggagatgcacatgcaggaaaatggcatcgtcagatcagtcttctttcttatgacaagatcgaggcattccgtgcaagaggtgcagaagtagaagatggcgcatttggagaaaatgtgatcgttcaggggattgatttccgtaatcttccagttggaacaagattaaaatgtaacgatgttttattagagatgacacagattggaaaagaatgtcatcatggttgtcagatcttccagaaaatgggagaatgtatcatgccgcgagaaggggtatttgcaaaagtgcttcatggtggtaaaataaaagccggagatgaaatgatcgtgcttgcagcagacgaataaggaaaaaattacctgggaaacatttctgcaacggtacggaacagatgcgattggaaggaaatagatgagaaagaagcaatgggtggcggcggctcttgtggggcttgcagttattcttgtcggcgtgggttccggcaacgtgaagacaagacagacgaagaaagacaagcaggaaaacacgcagattgtcagtggagttcagattgttacagaagacggaaagaagtactatgacttccaggatgtgaaagagaataattatagagcaaggcttctggaacaagtaccgaggaattcttatgattttagcaatctggcattagatgaagagacaggatatctttcgtataaagatacgaagggaaaagtgtcagcgaaaaaaggaattgatgtttcggagttccagggagagacgatcgactggcagcaggtgaaggaaagcggaatcgaattcgtgatcgtaagacttggataccgtgcatatggagagagcggtgcgttagttgaagatgccatgtttgaacagaatgtacaaggcgcattggatgccggtctggaagtcggtgtctatttcttttcccaggcaatctcagcaacggaggcagtcgaagagactgactttgttttggaacatatccagccgtatcagattacaggacctgttgtctatgacacagaagaaatcaaagatgatacagcaagaacagaccagaatacaagggaagactttacgaatttttgtaaagtcttttgtgacggagtgaaacaggctggatatcaaccgatgatttatgctaatatgaaatggatggcatttaccttgaagatggaagagctgacagaatatgatttctggtatgcggattatcatgaacttccgcagtgtccatatgattataagatgtggcagtacagtgaggccggtacggttccgggaattcgtgcaagcgtagatttagatttgtggtttcaggaggaaaactagatgaaatggaataaattcagattgaagacaacaacagaggcagaggatattgtaagcagtatgctggcagatcttgggattgaaggtgttgagatcgaggataagatcccgctgacagagtctgataaagagcagatgtttgttgatattttaccggagatcgaggctgatgatggtgtggcttacttaagtttttatctggaagaggatgaggacaaagaaaaagttctggcaaatgtgaagaaagaactggaggagatgtctgcttatgtaaatgtcggagcctgcgagattgaagaatcccagacagaggatgtagactgggtgaataactggaagaagtattttcatcagttctatgtggatgatattctgattattccatcctgggaagatgtgaagccttcagatgaagataagatggtgatccatattgatccaggtacagcatttggtacaggaatgcatgagacaacacaactttgtatccgtcagatcagaaagtatacaacagagacgacaaagattcttgacgtgggatgcggaagcggaattcttggaatgcttgcgctgaagttcggagcagagtattctgttggaacagatctggatccgtgtgcaatcgatgcaacttatgagaacatggagaacaacggaatttccaaagataaatatgaagtaatgatcggaaatattatcaatgacaaagaagttcaggataaggttggatatgagtgctacgatattgtggcagcgaatatccttgcaccggttcttgtagaactcacaccagtgatcgtgaaccagctgaaaccaggcggaatctatatcacaagtggaattatcgatgataaagaagagatggtgaaagaagctgttgcgaaagccggactggaacttctggatgttacatatcagggcgaatgggtatgtgtgacagcgcgtaagaacgcataaggagaaacaagatgcagcatttttttgcagatccatcctgtgtggacggagaacagatccgtctggcaggaagtgatgtgaatcatatgaagaatgtactccgaatgaaacccggagaagaagtgtgggtcagtgatggagaaggaatggattacttctgcagtgtggaaggttatgaggagaaggaggcagtccttcgcgttgtgaaaaaagaagtgtctcagacagaactggcttcccgtctgatcttattccagggacttccgaaaggggataagatggaatggatcgtgcagaaggcagtagagcttggagcttatcgtattgttccgtttgcggcaaagcgttcggttgtaaagctagatcagaagaaagccggaaagaagagagaacgctggcaggcaatcgccaagggggctgcggaacagtcgaagagaggaattgtgccacaagtgcaggatgtgatgagctttcaggaagcgatgaattacgcgaaagagctggatgtagtgcttgttccttatgaactgcaggaagggatgaaagcaacagaagctgtcataagtaagattgaaccggaacagtctgtcggtatctttatcggaccagaaggcgggtttgacgagagcgaaatcgagcaggcgaaagaggccggagcgatcccaatcacacttggaaaacgtattttaagaacagagacagcaggacttacaacattgtcaattctgatgtatcatttagaatgccgggaacagttggacgataaaaacataagataatagaaagacgttgccggttgcagacgcctgtgaatggtaacagagttagaaaagggaagataaaatggaagcatatttggataattcagccacaaccagagcatatccggaagtgggagatcttgtatataaagtaatgtgtcaggattatggcaatccatcctccatgcaccgaaaaggtgtagatgcggagcattatgtaaaggaagccaaggaaacgatcgcaaaggttcttaaggtaaatgcgaaagatatttactttacatcaggaggaacagagagtgataatcttgcactgatcggatgtgcaagagcaaacagaagagcgggaaatcacctgatcacaacttcaatcgagcatcctgcaatcttaaatacaatgcgttatctggaagaagaggaagggttccgtgtgacatatcttccggtagatgcgagtggaagagtgaatctggaagcattgaaagaagcactttgtccggagacgattctcgtatcagttatgtatgtgaacaatgaggttggaacacttcaaccgattgatgaagcggtaaagattgtaaaagagtataattcttctattcttttccattcggatgcagtgcagggatttggaaaatatcacatttatccaaaacgtcagaagatcgacctgttaagtgcgagtggacataagattcatggaccgaagggaaccggattcctttatgtgggtgaaaaggtgaagattaaaccgattcttttcggaggaggacaacagaaggatctccgttcgggtacagaaaatgttccgggaattgcagggcttggacttgcaacaaagatgatctataatgatctggatatgaaagtagctctgatgcgtgaactgaaggattattttattgagcaggcaggaaagattgagaatacaacagtccatggtctgaaagatgaaggaagtgcaccacatatcatcagtcttggaattgcaggaatccgaagtgaggttcttcttcatacactggaagataaggggatttatgtctcatcaggatctgcatgtgcatcgaatcatccggcagtaagcggtgttctcagaagcattggggcggcacaggaatatctggatgcgacgattcgtttcagtatgtcagaatttactacaaaagaagaaattgactacacgctggaaacactatataattgtataccgatgctgagaaaatatacgcgtcattaattgacgtcgattcataaaggagaaaaagcatgaaatttcattcatttctgataaaatacggcgagatcggaattaagggaaagaaccgttatatctttgaagatgcactggtacgtcagattcgttatgctctgcagggcgtagacggagaattccttgtacacaaatgtcacggaagagtctacgtggattgtgatggagattatgattttgatgagacagtagaaagccttcagaaggtattcggtattgttggaatctgtccggtagtccgtgtaccggtggcagagttggaacagctgagaaaagatgttgtagcttatgtagatgaagcttacgaagagaagaacatgacatttaaagttgatgcaagaagagcaaagaagagctatcctgcgaactctatggagatcaactgtgaagttggagaagcaatcctggaggcatttccggaaatgaaagtagatgttcataagccggaacttcgtatcaatgtggagatccgtgaagaagtttatatctattccagaatcattccgggaccgggaggtatgccaatcgggacaaacggaagcgcaatgctgcttctgtcaggaggaattgacagtccggttgccggatatatggtatccaagcgtggtgttgaactcgaggcaacttatttccatgcaccaccgtacacaagtgaaagagcaaaagagaaggtagttgatcttgcaagactcgtttctgcttattcaggaccgatcaagcttcatgttgtcaactttacagatattcagctttatatctatgagaagtgtccacatgatgaactgacgatcattatgcgtcgctacatgatgaagatcgcagaacattttgcaaagaaagacggatgtcttggtctgatcacaggagagagtatcggtcaggtagcaagccagacaatgcagagtcttgcagcgacgaatgcagtatgtacacttccggtttatcgtccgctgatcggatttgataagaaggatattgtagaaatttctgagaagatcaatacctatgaaacttcaatccagccatttgaggattgttgtacaattttcgttgcaaaacatccggtgacaaagccgaatattgaacgaattgagaagtctgagttgaaccttgcagaaaagattgacgaactgatgcagacagcaattgatactgttgagatcattgaagtgaagcagggagaataataggaaaatgaaaagctgctccaatggaacagcttttctttactctaaaaaatatgcagacaagctacaaaaacaaagtccgcatgagttgtattcagatagaattatttgatgatgtaagcatcaagtgcagcaagaatatcatcaatattgctgtcggcgtggatgttcaggtcgatcggtttggaaagatcaaggctgaaaatacccatgattgatttggcatctataacatatcttccggatactaaatcgaaatcattatcatattttgtgatagtgttaacgaatgatttgactttgtcgattgagtttaatgaaatctgtactgttttcatttgaaatccctccttgaattatacaataaagttggctcctaagcctaggtatattctacgggatgcaggttcaaaagtcaagaaattaacgagataaaaggaaaaaagaggtagaaataaatgaagaaagcagcactgcacaatttgggatgcaaagtaaatgcctatgagacggaagccatgcaggaaatgcttgaaaaagcagggtatgagatcgttcctttcaaggaaggggcagacctttatgtaatcaatacatgtactgttacaaatatcgcggaccgcaagtcgagacagatgctgcaccgggcgagaaaaatgaatccggatgcagttgttgtcgctgcaggatgttatgtccaggcgaaggaaaaagagattcaggtggatgattgcattgacattgtgcttggtaataataagaagcagaatctgatcgaagcattggaagagtatgaaagaacacacaatgcagattgcaacgtaacagaaaatgaaaagaatgcaaagaaccaggaaaacgacagaaaagcagagatcaagatggaagagatcggaaagacaaaagagtacgagaatcttcacctgacgaagccgggagatcatacaagagcttatattaaagttcaggatggatgtaatcagttctgcacatattgtatcattccatatgctcgtggaagagtccgcagccgttccatggaagatgtgcttgatgaagtacgtacactggcagataacggatataaggaggttgtactgacaggaattcatctgagctcatatggaattgattttgataaagaatatcaccttctggaattgatccgggcagtccatgagattgatggaattgaaagaatccgtcttggctctttggaaccggggatcatcacagaaaaatttgcagaagggattgcaaagcttccgaagatgtgtccgcatttccacctgtctctgcagagcggatgtgatgcaacattaaagcgtatgaaccgtagatatacaagcagtgaatatgcggaaaaatgtgaacttctcagaaaatacttcccgaatccggcattgacaaccgatgtgattgtgggattcccaggagagacagaagaagagttcaaagagtcatatgattttgtagacagcatagatttctatgagacacatatttttaaatactcccgccgtgaggggacaaaagcagctgtgatgccagatcaggtagatgaacagatcaaggagaagagaagtgcacaattaattgaacttggtgagaaaaagcgtgcagcatatgaacagagtttccagggaaaagaagtggaagtacttgtggaagaggatctggaactgaatggaaaagaagtacagataggtcatacgaaagaatatatgaaaattgcactagagacaaatgaaaatctcaagaatagtatcgtaaaagttcaaattgggaaggattcgcaaattatacattgaattttgaattcggttatattagaattataagtagggtttctgggtttccagagcgttttgcgctgtttgacagaacaacagcaaagcccttcggaagaaggaaatagatacaagaaagagaaggaggaagaaagatgagtgatttaagtagtactcagttctttcaggtagagccgggtccgcagatttctgcgaaggatatttttgagatcgtatacaaggctctgaaagaaaaaggatacaatccggtgaatcagatcgttggatatatcatgtcaggagatccgacatacattacaagttttaacggagcaagaagcctgatcatgaaggtggaacgtgatgaactggtagaagaactgttgaaagcgtatattgagcataatgcgtgggaataatcagacaatgagagtaatgggactggactatgggacgaagactgtaggtgttgctatcagcgacccgctcggacttacggcccagggaattgagacaatacaacggaaagaggagaacaagctgcgccgtacctgtgctaggattgaagaattgatcaaagaatatcaggtagagaagatcgtgcttggatttccaaaacatatgaataatgatatcggggagcgtgcacagaagtcattggaatttcgtgacatgctggttcgtcgtacaggactggaagtgatcatgtgggacgagagacttacgacagtagcggcagagcagacactgatcgagagtggtgtgagaagagaaaacagaaagcaatatgtcgataagattgctgctgtgttcattctccagggatatttagattcgatttatatgcagaaaacagcagaatagaggaaaatcatatggaaaaggcaaagtttactttcagtgatggaagtggagcagatgagttctttgtacttgaagagacaaagatcaatggttccgcgtatattcttgtagttgattcagaagaagatgacgcagaatgcctgattctcagagaagttgaagaatcaaaagacgcagagaagacgtatgagatcgtggaagacgatacagagctgatggcagtttccaaagtatttgaggaattgctggaagacgtcgatattgagatgtaattacatgaaagaaatacgaatgtaagagaaactgcagacaggaatacttttctcacttttgcagaagtgtcagaaaaaagtctggagttctttttacaatatagataggaggcagacagatggaagcagataagacacagaagcttctgaaagagaagttaaaggaaaaggggctgaaggtgactcaccagagactgcttgttctgtccgtacttgaagagaacagtgggagtcatatgacagcggaagatatctatgatctggtatcagaggattatccggagattgggcttgccacagtatacagaacattacagcttttgtgggatatgcagctggtagacaggattaattttggggatggatgtgtgcgctatgagatcggacatttactgaacggggagacaaagcataatcatcatcacctgatttgtaagagatgtaacaaggtgatgccgtttgatgatgaccttctggagagtctggaagatcatatcgagaaggcaaccggcttccatgtcctggaccacgaactgaaattctacggactgtgtaaagactgtatgaagaaacagagatagtggaggtgtatattttttgaaaaaacagaataatggaaaattgcgtatcataccgcttggaggtctggaacagattggtatgaacattactgcgtttgagtatgaagacagtattgttgttgtagactgtggtcttgcgttcccggaagatgatatgcttggaatcgaccttgtaattccggatgtaacctacctgaaagataatatttccaaggtaaagggatttgttatcacgcacggtcatgaggaccatatcggtgcattgccgtatgtactcaaagagatcaacattccgatttatacaaccaagcttacaatgggaatcattgagaacaagctgaaggagcataatctgcttcgtggaacgaagagaaaggttgtacgtcatggtcagtcaatcaatcttggaaagttccggattgaatttatcaagacgaaccacagtatccaggatgcgtccgcactggcaatctattcaccggcaggtgttgttgtccacacaggagacttcaaggttgattatactccggtatttggagatgcgatcgacctgcagcgttttgctgagatcggtaagaaaggcgtgctggcactgatgtctgacagtacgaatgcagagcgaaaaggatttacgcagtcagaacgtacagtaggtatcacatttgatcacatttttgcagagcatcagaatacaagactgatcattgcgacatttgcttcgaatgttgaccgtgtacagcagatcatcaactccgcttataagtatggcagaaaggttgttgtagaaggtcgtagtatggtgaatatcatttctacagcatcagaattaggatatctgaatgtaccggataatacattgattgagattgatcagatgaagaattatccaccggagaagatggtgctgatcacaacaggaagccagggagaatctatggcggcactgtcaagaatggcagctgacgtacaccgcaaggttacaattcagccgaatgatacgatcattttcagctccaacccgattcctggaaatgagaaatcggtttcacgtgtaatcaatgaactctctgcaaagggagctgaagttattttccaggatgcccatgtatcaggacatgcctgtcaggaagaattgaagttgatctattctctcgtaaaaccgaaatatgcgattccggtgcatggtgaataccgtcatctgaaagcaaacgcaggtgttgcgaagagccttggaattccgaaggaaaatgtatttattatgcagtccggtgaagtacttgaattgtgtgatgattacgctaaggttgtagataaggttcatacaggagcaattctggtagacggacttggtgttggagatgttggaaatatcgttcttcgagacagacagcatcttgcagaagatggtatcattattgtggttcttacattagagagaagaacgaaccgcctgcttgcaggaccggatatcgtatcaagaggatttgtctatgtcagagagtcagaggagctgatggatgatgcaagaaaggctgtttcagaagcacttgagaaatgcctgaaaggaagacatacagactggaataagatcaagcttgtgatccgtgatgcaatgaatgactatatctggaagaagacaaagagaagaccaatggtgatcccgatcatcatggatgtggatgtgtaagatatgatagtggatgagcgtattattacattcatcaattctatggatacagagaacagtgaaatactggagacaattgaacaggaagctctggcggcggatgtaccgatcatccgacgagagatgcagagcttcctggaggttctccttttgatgaaaaaacctatgcgcgttctggaagtcggaactgccgtaggtttctctgcgttattgatgagtgattacctgccggaaggtggacatataacaacaatagagaattatgagaagagaatcccgattgcgagggagaatttccgcagagcgggaaaggaagataagattactctgattgaaggagatgcgacagaagtacttgcggaaatggaaggaacttttgattttatctttatggatgccgcgaaagggcaatatattcattatcttccgaatgtattgcgattgctttcggatggaggctgtcttgtgtcagacaatgtgatgcaggatggggatatcatagaatcccgttttgcggtagaacgcagaaatcgtacaatacatgcgagaatgcgagaatatctgtatgaattgaaacacagagaggatctggtcacatctattattccgcttggagatggtgtggcagtgagcataaaacaaggagtagaaaaatgagtagaccgatcgaactattgatcccggcgagcagcctggaagtgttaaaaacagctgtaattttcggtgctgatgcagtatatatcggaggagaagcatttgggttgcgtgcgaaagcaaaaaatttctctatggaagaaatgaaagagggaatagaattcgcacatgcacatgatgtaaaagtgtatgttacagcaaatattcttgcccacaacgatgatcttgaaggggtaagagaatattttgaagagttgagagagattaaacctgatgcactgatcattgcagatccgggggtgtttgagattgcaaaagaggtatgtcctgagattgagcgtcatatcagtacacaggcgaataacacaaactatgcaacttataacttttggtatcgccagggtgcaagtcgtgtggtttcagcaagagaattgtctctgaaagagattaaggagatcagagaaagaattccggaagatcttgaaattgagacatttgtccatggagcaatgtgtatctcttattccggacgctgccttctgagtaattattttacaggaagggacgcaaaccagggtgcatgtacacacccatgccgttggaagtatgcagtagtcgaggaaaagagaccgggagaatatctgccggtctatgagaatgaacgcggaacttacatctttaattcaaaagatctttgtatgatcgagcatattccggaattaattgatgcgggaattgacagttttaagatcgaaggacgaatgaaaacagcactttatgttgcaacagtggcgagaacttaccgtaaagcaattgatgattatcagaaagatccagagctttacaagaagaacatgccttggtatctggatcagatttcaaactgtacttatcgtcagtttacgactggatttttctttggaaaaccagatcatgagacacagatttatgacaataacacatatatccgagagtatacttatcttggaattgtcggggctgttgagaatgggcttgcaagaattgaacagcgcaataagttttctgtaggtgagacaattgagatcatgaagccggacggaagtaatgttgaggcaaaggttctccggatcctgaatgaggatggagaggaacaggaaagtgcaccgcattcaaagcaggttcttcatgtagaactgagcgagacaccagctcagtacgatcttctcagaagacaggaagaggataaagaagttaattcatagaagagtcttagaaagttcaaaaatattgtcggagttttccgatagcacttttttcgatacgggatacataggagcgggagatgcccagttgtgcggcaatctcccgctgcgtgtattcttctccctgatacagtccgtatcgcattttcaatacaagtttttctcttggagaaagttcattttccagtttttcataaagcttttgaatattgtccttcagatgaatccgctctggaatatctgtttctgtagattcgatgatatcgtagaggttgacttcatttccttcccgatctgtgccaatcggttcataaagagagatttcatggctgcatttttttctggcgcgcagatacatcaggacttcattttctacacaacgggaggcataggcagccagacgatttcctttttcaggatcgaacgtaattatagctttgatcaggccaatcgtgccgatggaaatcagatcttccggatcttcactggtattttggtatttccgtataacatgggcaacgagacggagattgcgttcaattaaaatatgcttggcttccagatcgccctcggtgtatctctgaatgtattttttctcttccgccggtgtgaggggattaggaaatgctttcaagacagcacctctggatgcatttaatatagtttatgaaaaaatgtggaaattgtgcttttccatatgctcaagttctcggaaactgattgacaaatcgatattcggaagttatgatatctatacattctcggaatgtcagttccgaaaatcaaatccggctgattcagccagaatttcagcagcttacaatggggtgtaagaagaacaggtgcgcttgtgactgggaaaaggaaggagcgcatatgagttttagtacagtaaaatccgcggcaatggaagggcttgcggtagaaatggtctatgtggaggcggatgtcagcaatggacttccgatttttcacatggtgggatatctgtcatcagaggtgaaagaagcagcagaacgcgtacggtctgcagtccggaattcaggtcttgaatttccggcgaaacgtgtggtgatcaatctttcgccggcaactatgaggaaaagaggagcgtcatttgatcttccaatcgcagtgtcgattctgacgtcacttggcgttttacaacagaatagaagaatgaaagactgtatgatcatcggagaactgggattggatggacaagtcagaaaagttcccgggattctttctatggtatcagaggcaaaggtacaaaaagttacaagctgtattgttccgagagaaaatgaaaaggaagcagaacttgtagaaggggttcggatcattgcagttggaagtctcagggaatgtatcagttatttgaaagatggagacagaacaggtggagaacagagatatcttggtgaaaaagaggctgataaaatagaagacagaggaaaagtgggagaagaagtacctgatttcgcagacttatatggtcaggagaatgttcgtcgggcagcggaaattgctgtggcgggagggcataatctgcttatggtcggaccacccggaagcgggaagacaatgaccgcaaaatgtatggcaggaattctgccgccgatgaattatgaagaaagtatggagcttacaaagctttatagtgtcatgggaatgctggatggaagggaaccactgatttccagaagaccttttcgagaggtacatcatactgcaacgagagcagcgctgattggtggtgggattgttccaagaccaggagagatcagcctggcgcatagtggtattttatttttggatgaacttcctgaatttaagagaagtgttcttgaagtgctcaggcagccattggaacaacgcagcatacagatcacaagaaccagcgggaattatatctttccggccgattttatgcttgtgtctgccatgaatacgtgtccgtgtgggaaatttccatcgacagcctgtacttgtacgccggcacagatccaggcgtatttaagcaagatcagccaaccgtttctcgatcggattgaccttagtgttgaagcttctaaagtggaatatcgggatttggtgaaagagtctgtttcctgtccggagtcttcggcggtgattaaagcgcgggtatgtgaagcaagaaagagacagaagattcgctaccaaaacacgaagatccagtgtaatgcaatgcttcatggtgcagaattgagtaagtattgcagattaaacggagaagaaatgcgactgatggggcaggcttatgatgtactgaatctgacggcgagatcttatcaccgaatcttaaaggttgcgagaacgattgcggatttagattacagtgaggagataaaactggaacatttacaggaggcgatcggttaccggacattggacaggaaatattgggggaggtatgtatgatgtgtgaagagatgatttttgaatactggttttctacgattcgaaaactatctgcaagaaaaaagtatctgctccgagaactcataggaagtggaaagaagatatattatatagaagaaactgaaattacaggaattgaattccttacagaggaagaaaaagagggattaaaaaaagcccggaaagagaaaacgaaagaacaattaaaagaagagttttacaaaatgcaggaacatggaatcgaatttattccatttttttcaaaagaatatcctccggggctggctgagataccagatcccccgtttgctctttttgtgaaaggaacatgtccgggagccaagaagaaggcagcaattgtcggagcaagggggtgtagtggatatggagaacattatacaagagaatttgcggaagtactggcggcagcaggtgttgatatcatcagtggcatggcgaaagggatcgatggaacaggacaaagagcagcgttgaatgcaggcggaaaatcttatgctgttttagggagcggagtggatgtctgttatccaagagatcatatcggtttatatatggatatcatagaacacggaggcggaatcctttcggaatttccaccgggaacccctccgcttgcaatgaattttccaatgaggaaccggatcatcagcggactgtcagatgcagttctggtaatggaggcaagggtgagaagtggttctttgattacagcagatatggcactggagcagggaaaggatgtttatgcccttccgggaccgctggacagtcctttgagtgccgggtgtaatcacctgatccaacagggtgccggaatccttctgaatcctaaaaatctgctggaagaatgggggattgaaacaaatgttttgtgcagaaacacggagataaaaaacgagaaaaataaaaaagtgcttgaaagtacagatgatttggtgtatagttgtgtcggtttgtatcccaagaatgtggatcagattgcgcaggaatctcgggtggagatcagaaaattgatgagcattcttgttacactggaactgcagggatacattcgtgaaataacaaagaattattatatcagaataaaataggagtatagtttttatggcacattatcttgtaatcgtggagtctcctgcaaaggtgaagacgattaaaaagtttctaggaagcaattatacagttgcagcatcacagggacacgtcagggatctgccgaaaagtcagctaggaattgacgtggagaatgattacgaaccaaaatatattaccattcgtggaaaaggagagattcttgcaacgctcagaaaagaggcgaagaaatcagacaaagtttatcttgcaaccgaccctgaccgtgaaggagaggctatttcctggcatcttgctgctgccttgaagctggacgagaagaaaatgcgccgtattacatttaatgagattacaaagaatgctgtgaaagcatctttgaaagcaccacgtgatattgacatggatcttgtggatgcacagcaggcaagaagagagcttgaccgtatggttggatataagatcagtccattgctttgggcaaaggtaaagcgtgggttgagtgccggacgtgtacagtcagtcgcacttcgtattgttgcagacagggaagcagagattgatgcatttattccggaagagtactggtcattggatgcacaactgaaagtaaaaggtgagaaacgtcctctgacagcgaagttctacggaacagagaagaaaaagatgacgatccattcaaaagaagagatggacgagatcttaaagaaattagagaacgaagagttccagattacagatatcaagaacagtgagaggacgcgtaaagcaccactcccatttacgacaagtacactgcagcaggaagctgccaaggcattgaactttggtacacagaagacaatgcgtattgcacagcagctgtatgaaggtgtggacattaaagggaatggaacagtcggtgtgattacttatcttcgtacggattctacacgtatttcagaggaagctgatgcagcagcaagaagctatattgctgagacttacggggaagcatatgtggcagaaggaacaaaaacaaagtctgcagataagaagattcaggatgcgcatgaggcgatccgcccgacagatattacacgcacaccggcagcaatcaaggattcattaagcagagatcagttccgtctgtatcagctgatctggaaacgcttcacagcaagccgcatgcagccggcgaagtatgagacaacagcagtcaagatcggagccggtgagtactgctttactgtatcaacagcaagggttgcatttgatggatttcgctctgtgtatgtagaggcagaggaagagaaggaagagagcaatgtactggtcggacatcttagcatgaattctgttcttacaaaagaagaatttgatccaaagcaacattttacgcagccgccggcacattatacagaggcgagtcttgtaaagacaatggaagagcttgggatcggacgtccaagtacctatgctccaaccatttctctgatccttggaagaagatatattacaaaagaaggcaagaatctttatctgacagagattggtgaagttgttaataatattatgaaacagtcattcccaagtattgtagatgttcattttacagcgaatatggaagggcttcttgatatggttgaagaaggaaaggttccgtggaaggaagtaatccgtaatttctatccggatcttgaggaagctgttgaaattgcagagaaagagcttgaggaagttaagattgaagatgaagtaacagatgtgatctgtgaagagtgcggtcgtaacatggtgatcaaatacggtccgcatggtaaattccttgcatgcccgggattcccggaatgcagaaatacaaaaccatatctggaaaagatcggagttccgtgtcctgtgtgtggaaaagaagttgttatccgcaaaacaaaaaagggaagaaagtattatggatgtgaggataatccggaatgtgaatttatgtcctggcagaagccatccagtaagaaatgtccggaatgtggtggatacatggtagaaaaaggaaataaattagtttgtgctgatgaaaagtgcggatatgtggaaacaattaagaaagaagattaaatatttcaaaaaacagaaaaacacaacgttgctattttctgaattgtatgataatataagctagtaaggaatttgaaatttgatttgtgtatacaacttggaaaataatagttactgtttgctagaagtagtgaataagagcaaatcatgtggaggagacaatgagcgtacaattattggataagaccagaaagattaataagttgctgcataataataactccagcaaagttgtgtttaatgatatctgtgcggtactgacagagattttggactcaaatgtgctggtagtcagcaagaagggaaagattcttggagtcagcaaaagcaataaggtgagagaaatcagtgaactgatcacagaatccgtaggatctcatattgataatatgcttaatgaaagattgctgagtgttctgtctacaaaagagaatgttaatctggagacacttggtttttcttcagatgctgtggaaggatgtcaggcaatcatcacaccgatcgatattgccggggagcgtctcggaacattgtttatctacaaacaggatgcaacgtattctattgatgatattattctcagtgaatatggtactgctgtagtaggacttgagatgcttcgttcagtgaatgaagaaagtgcggaagagacaagaaaagaacatgtcgttcaggcagcaatcagcacactttctttctcagagctggaagcaatcattcatatctttaaagaacttgatggtacagagggaatcctggttgccagcaaggtagcggatcgtgtgggaattacaagatcggttatcgtgaatgcacttcgcaagtttgaaagtgcaggagtaattgaatcacgttcttcaggaatgaaaggaacttatattaaagttctgaatgattatgtatttacagagctcgagaggattgagaaagagcggatgtaagcagaaggagaagacaagatgtacgagggaaatccggttgatctgcagatggaaaaagtgatttcagcagatgctatttttgatgatacaacaagagtctgtaaggtggatcattatgatacagaagaagattacatttatcttgaagtgatggaagatcctctgacaacgattctgctggatgcaaaatacagatgttatatttcaacggggacagagctgttgtgctgctccggtgttgtgaaagagagataccagtcggaagacaggaatctactgaagtttaaaattgagaacggattctatgagatgaacgaaagaagatcatagagaagttttagagacgaaagaaaagctgtgaggcagagaaagccccatggcttttcttttataaaaaatatgtaaactgtgttgacaaatgaaatggggagtgctattttatattcatgggttagcactcaagagaaatgagtgctaataaagtaaggaggaattacaatgaaattagtaccattaggtgacaagatcgttttaaaacagttagaagcagaagagacaacaaagtccggaatcgtattaccgggacaggcaaaagagaaaccacaggaagcagaagtaatcgcagtcggacctggcggagttgtggatggaaaagaagttgtaatgcaggttaaggttggagataaagtaatttattccaaatatgccggaacagatgtagagcttgaaggagagaaatacatcattgtaaagcagaatgatattcttgcaattgtagagtaatacccagacaaatataaaggagatgcagttaaaatggcaaaggaaatcaaatacggatcagaagcaagagcagcacttgaaagaggtgtgaatcagttagctgatacagttaaagtaacattaggaccaaaaggaagaaacgtagtacttgataaatcattcggtgctccgcttattacaaatgatggtgtaacaatcgcgaaagagattgaactggaagatggatttgagaacatgggtgcacagctgatcagagaagttgcagctaagacaaatgatgttgccggagatggtacaacaacagctacagttcttgcacaggcaatggttcacgaaggaatgaagaaccttgaggcaggagcaaacccgatcgttctgagaaaaggaatgaagaaagctacagataaagcagtagaagcaatccgtgagatgagcagcaaagtcaacggaaaagagcagatcgcaagagttgctgcagtttcttcaggagatgatgaagttggacagatggttgcagatgcaatggaaaaagtatccaacgacggagttatcacaatcgaagagtctaagacaatgcagacagagcttgaccttgtagaaggtatgcagtttgaccgtggatacatttccgcatatatggcaacagatatggagaagatggaagcagttctggatgatccatatattctgatcacagataagaagatttccaatatccaggagattcttccggttcttgagcagatcgttcagtctggagcaagacttcttattatcgctgaagatatcgagggtgaggcactcacaactctgatcgtgaataaactgcgtggaacattcaacgttgtagcagtaaaagcacctggatatggtgacagaagaaaagagatgcttcaggatatcgcaattctgacaggtggacaggtgatttctgaagaactcggattcgaccttaaagaaactacaatggatcagcttggacgtgcaaaatctgttaaggttcagaaagagaatacagttatcgttgacggatgtggagacaagaacgcaatcgcagatcgtgttggacagatcaagaaagcaatcgaagagacaacatctgatttcgacagagagaaacttcaggagagacttgcaaaacttgcaggcggagttgctgttatccgtgtaggtgcagctacagagacagagatgaaagaagctaaacttcgtatggaagatgctctgaatgctacaaaagcagcagttgaagaaggaatcatcggtggtggtggatccgcatacatccatgtttctaagaaggtaaaagaattcgcagagactcttgagggagatgagaagacaggtgccaagattatcctgaaagcactggaagctcctctggctcagatcgcaaagaatgcaggacttgagggagcagttattgtaaacaaagtaagagagtctgaagtaggaacaggatttgatgcttacaatgagacatatgtagatatggttgagaagggaatccttgatccggcgaaggttacaagaagtgctcttcagaacgcaacaagtgttgcttctacacttcttacaacagagtctgttgtatctacaattaaagaggatacaccggctatgccagcaggcggagcaggtggaatgggaatgatgtaatctatccatcaggaagatttgcagaatttctataagaatagaataaaagagctgttacatagagatctgtagcagcaggaacagagggttctatcacattttcgtaatgtcagatagaaccttttgtttgttctaaaaaaggctcagtttgtcgcatagataataaataaaggagtacttataagtaaaacttaataatagaggttaaaataaatcaatacaaattatgagcacatcagggaaaatactcttgacatccttcgggaatttctgtagtatatcagttaataattacaaaagatttttagatacattaactgccatttcaaagcagtttcatgggttcttaagaaagagaggtaaagtataatgggtaagattataggggaaggtattacatttgatgatgttcttcttgtaccggcttattcagaagtaattccgaatcaggtagatctgtcaacacatctgacaaagaaaatcgtattgaatattccgatgatgagtgcaggaatggatactgttacagaacatagaatggcaatcgctatggctcgccagggtggaatcggaatcatccataagaatatgtctattgaagcacaggcagaggaagttgataaggtgaaacgttctgagaatggtgttattacagatcctttctttctttcaccggagcatacacttgaagatgcaaatgacctgatggcaaaataccgtatttcaggtgtgccgattacagagggacgtaaacttgtcggaatcatcacaaaccgtgacctgaagttcgaaacagatttctctaagaagatcaaagaatccatgacttcagaaggacttgttacagcaaaagaaggaatcacattagaggatgcaaaaaagattcttgccaaagcaagaaaagagaaacttccgatcgtagatgatgaaggtaatctgaaaggacttatcacgattaaagatattgagaaacagatcaagtacccattgtcagcaaaggatgagcagggaagacttctctgtggagcagctgttggtatcacagcaaactgtctggagcgtgtagaagcacttgtgaaatctcacgtagatgttgttgttatggactcagcacatggtcattcagcgaatgttatccgcacagtgaagatggttaaggatgcattcccggatcttcaggtgatcgctggaaatgtggctacaggagaggctgcaagagcactgatcgaagctggtgtagatgcagttaaagttggtatcggacctggatctatctgtacaacacgtatcgttgcaggtattggtgtacctcaggtttcagctgttatggattgttacgaagttgctaaagagtatggtattccgatcattgcagatggtggtatcaagtactcaggagatatgacaaaggcaatcgcagcaggtgcgaatgtatgtatgatgggaagcatctttgcaggatgtgatgaaagcccgggaacattcgaactgtaccagggaagaaaatataaagtatatcgtggaatgggatccatcgcagcgatggagaacggaagtaaagaccgttatttccaggagaatgcaaagaaacttgttccggaaggagtagaaggacgtgtagcttacaagggatctgtagaagatacggtattccagctcatgggtggacttcgttcaggaatgggatattgcggaacacacacaatcgaagaactcaaagagaacggaagatttgtgaagatctctgcggcatcattgaaagaaagtcatccacatgacattcatattacaaaagaagctccgaactacagtgtagacgagtaattgggaagtttgcagattttatgcagactgataatttggaagtactgcggatattccgcattacctgacgggatgaaaaatcacatccctgatataataaaataatatataggaacgccttgaggaattcccggaggttcagtgagagctggatctgccgggaatttctcttttatacgaatataaaacagttaagacaaaattcataaatggttaagaaacatatggtataatagctgaaataagaagatgtttgttttaaacgatggaaatgagagaattaaaaatcaggagaaataccgaatgagtacgtcaagacgaaatcagctggcagggcggaaaacattgccgaagaatacacgaaggaagaaaaagcgaggcaggaaaatgctgcggatcataatgatcccattaatgattttattactttttcttctttttaaatcctgtatacaaaagaaaaatcaatatgctgatgtggatgctacgcagccggagatggatgtacagttgttagatataaatccgtattccagaccagggacaacaattgaccatgtgaatgggattgttgtccattacacagcgaatccagggagtacagcgcaggataatagagattattttaatggtctcaaagatagccatgagacttcggcaagcagtaattttgtgataggattggaaggagagattattcagtgcattccgacctgggagatggcatatgcttcaaatgaccgcaatgcggatacgatttcgattgaatgttgtcatccggatgagaatggaaagtttactgatgcaacataccgctcacttgtacaacttacagcatggctttgtgcaaaatatgatctgacagcagatcaggtgatccgtcactatgatgtaaccggaaaaatctgtccgaaatattttgtagaggatgaggacgcatgggtagaattcaggagaaatgtgcaggatgcgttggaaaaacagtagacatcatttcactgaattgttataatgaaatcaattcttgggatcatagaagaattgatttcaaagcttacggagttagatgaaaataatgtttgaaaaattttttccagatgaatatttggggtcgacttataagatcccttttgaaaaactatatgagcaaggataccggggggtaatctttgatattgataatacattagttcctcacggtgcaccggcagatgaacgtgcaaagagactgtttcaaagactgagagagattggctttgaaagctgtctgttgtccaacaatcagaaaaaacgtgtagagatgtttaatcaggagatccagacgcattatatttataatgcgctgaagcctgcaagaaagaattatcttcatgcgatggagatcatgggaacagatcaggcgaacacgctgtttgtcggcgatcagctttttacagatgtatggggcgcaaagagggtcggaatacacaacattttagtgcatccgatcaatccaaaagaagagattcagatcgttttaaagcggtatttggagaagattgtgcttcatttctataagaagagcaaaaaaagattgaaaaaagtcgcaaattagtatagaatggtagaagcaaaaagtctgtaacgaacagttacattgtctgaacgaaatgcaattaaggaggattatacatggtttcagcaggagattttaagaatggtttaacaattgagattgagggaaatattttccagattttggaattccagcacgttaaacctggtaaaggtgcagcgttcgtaagaacaaaactgaaaaacatcatcagtggtggtgtagtagagaagacattccgcccgacagagaagttcgagaatgcacacatcgagagaaaggaaatgcagtatctgtatcaggatggagatctgtataacttcatggatgtagagacatatgatcagatcgctctcaacgctgatgtagttggagacgctctgaaatttgtaaaagagaatgagaacgttaagatctgttcccataagggcaacgtattctcagttgagccgccgctgttcgtagaactggcaatcacagagacagaaccgggattcaagggtgacacagctcagggagctacaaagcctgcaatcgttgagacaggagctactgttatggtaccgctgtttgttgagacaggtgatgttcttaagatcgatacacgtacaggcgagtatctgtcaagagtttaattacgaatttagtacagtttaagctgtatttcaaaaaggaatctgtatcatgcaggttccttttttctttgacaaaatcagatgaaattctctgttttcactaaaaaaatcaatttggatttatgcaaaattctggcttgctttttaaggaaggcctgtctataataaagagcacataatatttgttctaaattttaagaaattctatttggagagcttctgaactctccgggaaattctaactcaattgaaatagtacatttcgtactggtttctcattttaattttatgaaccgcaatcaggaaggagaagagtgaattatacagaatttgtaaatgcggtaaaggaaaaactgactcaggagttaaatggaggtgtcagggtaaacatctatacgacgaaaaaaaataatgcaacagagcgtacaggactaatcctggagacgccgggtgttaatatatcgccgacaatctatctggaagaattttttgaactatatgaaaaagggaaacagatggattggatcattgaagatctggtggagctatatgaagaaatccgacaggaaaaatcatgggattatgagagaatgctttctttcgaaggggtaaaagacagaatcatctttcgactgatcaacacagagaaaaacagggaattacttctggatgttccacatagagaatttttggatctgtcacttgtgtttgcagtacttgtagaagcggacaatgatgggacggcagtgatgctgatcaaagatctgcatatgagacaatggaaggtgacaaaagaacagctttggaatgtggcaaaagaaaatacaaagcgtctgcttccggcagaatgtttcggaatgaattttgcagtgtatgaactgctcagcagatcaactccgggggaacatgatcgggagaatctgttaaggagaacctggcatattcatgaagaactggaactcccggaaaaagataaaatgtatgttttgtctaataaactgaaaaattatggggcggcctgtattgcatacccttatattctggacatgcttgcaggagtcttaaaggaaaatttctatgttcttccaagcagtgtccatgaagtgatcattgtaccggaatcctctcagatccgtcagtcagaattagaaagaatggtgcgggaaatcaatgaaacgcaggtgcctgaggaagaaatcttaagcaatcatgcttatttttattatgcacaggaagggaaacttcagctggggaaagagatgtgtatcgacagggaggacaatgaatgaaaggacgcggagagattataacaatcctctgcatgtcagtcttttttatctgtattctctatgcaatgacatatggaggcattgtcaaggccgaagaacttgaaaaacagcctgaagaggacggagaaaaaacggaggttgatattgaagaagaactgcgctgggcagaagaagtaaaaaaaatcctgaaagatatcggtgtgggattttgcgacgaaacggaggataaacaggaggaagacaaggaagaaacttttgatcagacagatgaaaagaagatacaaagcataggtgtatatgcagcggcaagggcaggagaaactgtttatacaaaggcaatcgaaagaggaatcggtgcaatcgatgtagttgactataatgacccaaactggcctgtgctacaacattggaatgaaggaagacttggtacgaaatcaggagaaagtctgtattgcaccaatccaacattaaagtttcaggagggcaacaaaacagcagtagatgcttcaaaacgttataacaaacagaccattcagatgattgcggcaatgttctattactacgataagaataagtgcaacggtgtgagttcgaattacgattatctcttaaaacaatgcgcagtatggtggatcatgaatgaagtacatcactggtatggagatatggtccagatagaaacaggaaataatgtagcctgtgggaatggtcattggatctcagcacacaaatctgagtattatcaaaaagggattgcatgggcgaaagagaattataaatatttcccggatgcatatggggttatttatgaaggaaatggccagccgctcagtaaatggggcggaacataccagccgaccggaacagggagattaaagaaggtgtcagcgaatacttctgtgacagaaaagaacagttgctattctttggagggagcagagtatggcatttatagcagtcctactctttcgggtgcatcaagagcaggaacgtttagaacagatgcggcaggaaattcgtcatcagttgcactgaatgcaggaacttattacgtaaaggaactaaaagctcctaaaggttatgcacttgtggatgaagtaaaaacggttacagtaaaatccgggcaggagtctctggtgacattttcagacccaccgcagatgaatcctgtggaacttttgctaaagaaaacaggcatggaacaggagtatgttgatccgtcagggacagcagcgtatcagggagcacagtttttagtgaaattctatgcagaacttctggatccagggaaaaatccggaaaaggaaggggaaaagccagtcagaagctgggtctttcaaacagatgcaaaagcagtttgccgttatcaggagaagtataaggtaaaaggtgatgcattgtataaagcgacagacggaacagaagcgcttccgctgggaactgtaacaattcaggagataaaaccgccaaaagggtatttcctgaatgaggaagtctttgtttgccagataaaaccagaaggtacgggagaaaaaataaatgtatatcagaaccctacgataccggacagggttttccagatccatttggtgaaaaaagcaacagagacaggacatcctctttcgggagcgcagtttaagcatatcagaccggatggaagtgaaaagattctcacaacggatgaaaaagggactctgaaagtaatgccattatctcagggaacgcacaaattaaaagaagtaaaagcaccggacgggtatcggacaaataataatgaactgatttttcaagttgatgagagcgggaaaacagaatttttatctgaggtaaatacagaagaaggagaggttattatcgaatatacagaggatggaattgcggtagtgacgatagaagataagccggcctgttacaagattgagctgaaaaaggaaaatgaaaaaggtgttgcacttgcaggagctgagtttactttatatgaagaccaggcatgccagaaagaaattgaccgggtgttgacggatgggaatggaattgcaatgttcgaaaatctggaagtaaagaaaaaatactatatgaaagaaacaaaagcgccgacaggttacagaattccgaaaacatcagatgatgcagatattgtatatgaaatctgtctggaaagtaatccggaagaagggaagtgtctgttggttgtgaatggaaaagaatacagcagcaaagatactgcagacagcaagataagtattgaaggttcaattaaggagtggaatgtgaaaatgaagatcataaatcagacgggaaagaagcttccagatactggatcggcaggaaaacctgtgttacttacaggaattttagctgtaggaatcatggcaatgatttacagaaaaaaagatagtagtaaaacggtgaaaatgaggagatgacaaaatgaaaaaaagaatgatgaaaatttgttatatgatgactttagctgcggtactctgtacttctggaacaacaggtgtgactggaatcaaatctgtatatgcagcggaaaatgaagtacaggaaagagcagcaactacaaatggggttttaaatcttaacaatggaccggcaagtattacaatcaaaggaaatgacggacagagcctgaaaggaaaaagatttctggtatatcagttgtttcaggcagaaaatgcgaaaggaatggaatccattaattatacatttaatccggaatacaagaaatttgtttgttatatcgtgggacagcggattcataaggatgagagaaatgtaacagagtatgaggtgatcgactatattcagtctttgaatacgcatcagacagaaggtgcgcagaccgctcaggaaaaggaaggagcatacagtgaatatcgtgtttttgtagaagaattaagaacccatctacagagaaatggaaaaacaggtcaatctgttgaagtgacaagtacaaaagcagacaattcatttgaaattaagggattgccgtatggatattatattattgatgaagtgacagaggtaaaaggaacgaattcggcggcctctttgtgtatggtaagtacagctaatccggaaatgaatctcaacataaaatcagactatccggttgtgacaaaaaagatccgggaagatgatgatcaggacaaagttggaaatcagggatggaatgatttggctgattttgaaatcgggcagactgttccgtatcggtatgagtcaaatatgcctgatgttaacggatacaacacctattattacgcatggcatgatgtgatgagtgaagcacttactttcaaaaaggattctgtagccatccggatttatgaaagttcaaatgcaagaaattattatgaattgaaagagggtgaatttgaagtaaaggaagctccgggaggaggagatacgtttcaggtcattgtttctgatatgaaaaaaatcatagacagagagtttaatcgtaaaaatgaagcaggagaaaataaatatggacagaaaatagtgcttacctatcaggcaacattgaatgaaaaggcagcgaaaaatacaggacgtccaggatttgaaaacgatgttcggctggaattttcaaatgatccggattcagcggtgagaggaagtacaggatatacaccgtgggatacagttgtttgtttcacttataaaatcaatgcattgaaatcaaataaccatggacaaagtctggaaaatgccaggttcagactttattctgacgctggattaaaaaatgaagtatatgtaaaacagggagaaggtgggtacattgtaattaaccgggacagtcttggaggaaacgaccatacagatggaaagcagccggaaaatgcggtggagatgaaatccggtcaggatggaacatttgtgatctatggattagatagtggcacctattatctgaaagaaacagaggcaccggcaggataccgtctgctgacagagccgattgtgttaaatataaaagcaagttttccaaatgatagaaacgcatatgtaaaaggagacggaaaaacagaaaaaggattgaaaaaactggagacatctgcacagatcaaagaatttattaacggaaactggaaagaatcagaagtcagtctgacaacaaatgaaggcgaaggatctgctaatctgacagtaattaatacagttggaaaaaaactgccggtaacaggttcttcagcagctgttatctgtattacaaccggaagtgttcttgttcttgcaggagcaatgagaagaaacagaaaaaatgcaaaggaaaaacaatagattacagtcagatcttttactatggataggagttcttttgtgtagtatacctcttttgactggctggtatagtcagaagaaaacacaaaatgtgttggcaacatatgaacaggttgtggaacagacaacaggagatgaaattgaacaattaaggaatcaggctgatgaatataataaaaagctttgggcagaatcgaaaggagtcagggaacaaagcgagcctgaccagatggaagagtatgaaggtctgttaaatgccgaaaaaatacagacaggaatgatgtgtgtactggaaattccgtcaatagatctcaggcttccggtttatcatggaaccagcgaggcagtacttaaggaaggtgtagggcatttgatggacagtagtcttccgatagggggagaaaatacgcattgtgtgatgacgggacaccgtgggcttgcaagtgcgagacttttcactcgtctggatgaattaaaggaaggcgatgagttctttctggaagtactgggagaaaaactcgcatataaagtagaagaaataaatgtaatcttaccagaagaggtagaaagtctggaaatcagaccgggagaagatctggtttcgcttgtcacatgtaccccatatggaattaatacccatcggttagtgattactggaaagcgggttgtgtatgaagagaaaaaagaagagaaaatcaaaaagaaacgtccgtctgtcagagaaatgattttcacaatgattccaattctctttttggtatatgttgtgattgaaagaataaaaagaaagcgagaaaaaagaaattgtgagggaaagagaaaaagaaacagaaaccagaaaaggaaatgtaagcactacaggagaaagaaacgtaaaagaaagaaaagcaggagacaaaaaagaaagatgcaaaagacggcaaaatgggaaaatcaaatgcggaattcttcttcttttgatatgttttctggtggtagcagtaaagaacccggcgtttgcagaaacagaaacaggaaatatagaaatctgtattgaagataccggagaacaaattaagagagaaggtgttacattccagtattccaaagtggcatctcttgttgatggtgcttacgagatggggaaaagatatgaagataaaggcgtggatctcaatgaggtaaggtatgccagagaacaagaagagctggcgcggactttgagtaaatatcattatagtgatggattgtgcaggacggattgtgatggaaaagcaacccttacgaatctgagggcaggagtttatctgatctatgttgaagatgaatcagaatacgaggttcagccggttcttgtccagctgccaaaatgggaagaggataatggggcaatgaactggaatgtcagggtatgtccaaaacaaacgataagggaagaggctgcaaagaccggagattcacaacaggcaggtgcatgggcaatgctttgtcttggggcagggatattaattcttctgcttgcagtgaaaaaagattaaccgcagaaagttagaggtttatttgccactttacatttatacagaattgtgctaggataaaaaaggttgttagctgtacgaaattaaattttcccactaacaaccgagatgcgtctgtagctcagtggatagagcgatgctctccggaggcatgtgcggcggttcgactccgctcagacgctataggatatataggataaaaaagtcctgttatttcagcacattcagatggctgagaataacaggattttttcatatagttttttattcacaatctgcaaggatgtggtctttcatttcaggatcaaaccggttgtttcttagcatttcaatctcatacttataaggggcataagatttctttgcttttgttacagaaggaatataaggagtctcaaggatcttcggtacagattcgaaatccggatgatggacaattgtagaaattgcatcaaaaccgatttctccaaagccgatattttcatgccggtctttcgcggctcctggaatatttttactgtcattgatgtggaagactgcaatctgatcttttccaagcagacggtcaaaagactccataacatcatcaaaatgatggatgatatcatatccgctgtcacttgtatgacaagtgtcaaagcagactctcaatttatcattctggacaactccatcataaatccgggcaagttcttcaaaattccgtccgatttctgatccctttccggccattgtttcaagggcaatacagcagtcagtctcagcagtgagaacttcattgagtcctttgatgatctgtgcagttccgatttcgacaccggcacctacatgagcacctggatgaaggatcagagtgtggctcctgcaggcaatcgtgcggtcgatttcttttgccagaaattctacggcaagagagaacgtctctggttttactgaattaccgaggttgatgatataaggtgcatgaacgacaatttcatcaattccgtgttctttcatatattcccatgctggttcgatattcaattcactgatttcttttcggcgggtattctgtggggctccggtataaaacataaatgtattggcaccgtaagaaacggcttctttcgcagaaccaagaagcatttcttttccactcatgccaacgtgtgaacctaattttaacattgttggatatcctttctgtctgattttatatcatacaggatgtagaaactgtatgtgtaaagccgtggttacattataagtattggttatttttatgtcaattggttttgggggcagtccagatcaatttgaatcgttgccgttactgttcacagtaacgcttgctgttctgttggatacatgatagaataaatagtggctgtttgtctccagaaaagttgggaggcagacttgttttaataaaattgccgtcaggcagaaaagacaaacgaaaagtaaagaggagtgtgaaactttgaagacattactggaaatgatcacaatagaaatgaaagaagcgttcaaagcagcaggatatgatgaagagcttgcaagagttacgctttccaaccgcccggatctctgtgaatatcagtgtaatggtgcaatggcaggtgcgaagaaatataagaaggctccaatcatgattgcgaatgcagttgtggaagaacttgcagatagcaagtattttgcatcagcagaagcggtgaatccgggatttatcaacctgaagctggcaccggaagttgttgcagagtatttgaatgagatggcagcagatgagaatcttggtgttgaaaaagaaaagaatccgaaaaaagttattattgattacggcggaccgaacgtggcaaaaccgttgcatgtcggacatcttcgttctgcgattatcggagagagtattaaacgtattatccgttttaaaggaaatgatgtaacaggagatatccatctgggagactggggatatcagatgggtctgatcatcacagagctgaaaaaacgtaaaccggaactcccgtattttgatgagagttttgaaggagaatatccggaagaagcaccatttacgatcagtgaactggaagagatttatcctacagcaagtgcttatgcaaaagagcacgacgattatagagaagaagcacttcatgcaacttatctgttacagaatggatataaaggatatcgtgcaatctggaaacatatcatgaatgtgtctgtaactgacttgaagaagaactacgagcgactgagtgtagattttgatctctggaaaggtgaagcagatgcccaggcatatattccggatatggttgagatgctcaaggagaaaggattcgcacattatgatgagggtgcgcttgtagtagacgttgcagaagagacagataagaaagagattcctccgtgtatgattctgaaatctgacggagctgcgctgtatgatacaacagatcttgctacactggtagaacgtgagaaactgtatgatccagatcaggtgatctatgttgttgataagcgtcaggaactgcattttgtgcaggtattccgttgtgcgaagaagacaggaattgtaaaaccggagacagaacttacattccttggatttggtacaatgaacggaaaagatggtaagccgtttaagacaagagaaggcggtgttatgcgtcttgagaatctgatccgtgagattgatgatgagatgtataagaagatcatggacaaccgtacagtagaggaagaagatgcaagacgtacagcagaagaagttggacttgcagcgatcaagtacggagatctttctaaccaggcttctaaagattatatctttgatgttgacagatttacttcctttgagggaaatacaggaccgtatattctttatacaatcgttagaattaagtctattctcaagaaatatgctgagaatggcggagttcttgacggaacgatcagaccggctgagaatgatgcagagaagtctctgatgcttcaggtagtgaaattcaatgaagtgatcgataatgtatataaagagacagctcctcataagttgtgtgcatatatctatgatcttgcgaacgactttaataagttctatcatgagacaaagattcttgcagaagaagacgaagagaagaagaaaggttatcttgcacttcttacacttgcgaaaaaagtgcttgagacttgtattgatcttcttggatttacagctccggaaaggatgtaatacgaattatgacagaaaatggattgatggatggtacaagaacagaaaaactgttttacaatgacagccatctttcaaaatttactgcaatggttctggaatgtgagccgtatgagaaaaaggaaggatgctatgcggtagaacttgaccgtacagcattctttccggaaggcggcggacagtatgcagatacaggaaaactgaaggatgcgaaggtatctgatgttcgggaaaagaatggaagaattctgcatattacagatcagccgtttgaagcaggagagattgttgaaggagagatcgactgggagaccagatttatgaagatgcagcagcacaccggagagcatattgtttccggaatcgtgcatgcaagatacggtttcaacaatgtcgggtttcatcttggaacagaagattgtacgatggattttgatggagagatatcaaaagaagcactgcaggagattgaacttgaagcaaatcgtgcagtgtggaagaatctgataatagaagtgtcctatccatccaaagaagagctggaagaactggattaccgcagtaagattgagattgagggacaggttcgtatcgtatcggttccgggatatgatatctgtgcgtgctgtgcgccgcatgttgaacgcacaggagagatcggtatgatcaagcttgttaatatgcagcgatacaaaggcggcgttcgtgtgacaatgctctgtggaagccgtgcacttacagattatgagaagaagcaggaacagaacaggaaaatttcagcgtcgctctgtgcgaaagaatatgagacagcagaggcagtgggacacttgaaagaagagctggattctttgaaacggatactggtggagaaagaacgccagcttgtacacgtctgggcgcagtctgttccggaagaagaaaaaacggtctgtatgttttcagaggatatcagtgcggatgccatgcgtcagtatgtgaatgaagtgcttgaaaaagaaagaattctttgtgctgtgttttatggaaatgatgcagcgggataccgttatgtgatcggaagcagaacccaggatcttcgtgcattttccaaaatgttaaatgctgcattcgaaggacggggaggcggaaagccggagatggttcagggaactgtaaaaggtgaagccggaaagatcagagagtggattcagaagatagcggaggaattgtcttatgaaaaatgatccgagacgctccttctggagagctgccggtcctttacttggattctggggaatccagctggtgatggaatttgtgattgagtttataatcattcttccttttatgggggaagcatcttccaggatgacacaaagtggagaagttcttaattatcaggaaatgatgaataagtactatgaagtgttaagtcctgcgtttgataaaatcataggaggtcagattgcgattgcagggattgctacagcagcaacgttgtttctgacagttacattgtttgttatcgatcgaaagaaagagcagattgcagggatacagcggatgggggttcaaaagccactgaagaattactggtcactttttgtgatgggagtgatcggaagtattggtgctacatgtctgtccgctatggcacaggccgttttggttgatccggagtatatccagaccgcacagaatatgtattcagcagattttgtggtccagattattgtatttggatttgtaattccgattgcagaggaatttatgttccgcggagtgctctatcagaggtaccgggagaccagaggattttattatgcggcaatctggtcagcactgtttttctcagtcacacataccaacacggtacagatgatttacactttcctcctaggaattcttctgtgctatatttatgagaaatttggttcaatgaaagctccgattatgcttcacgttgttttgaatctgggctctttgatctttacagatatcggagtatttaaatggcttgccagagaaccgtttaaaatggcagtggcagtgatcatcagcacatttatctgtgcagcttgttttgtgtggattcagagaagcggggatccggtgagtactcagaaaacagaagaatagtgaaaaaatacgaatgaaataaattgtactaataaaaatacaatcttaaattgtgcgcgatgaggtgcgaaaccttgtcgcgcattttctttttaatccagtattttattaaataaaatcaaagaaaaacagaaatcttaataattaatattatttttataagaaaatcaaaataatctgactattaaaagaaaaataataaaaaatcaaataatcagacaatttacaagagtttccctatttacagcctaggtaaaagggtgtatattctagaaaaagttttacacgacgtgagaaagaaatgattgaatgcgccggacaaagaagattttaaagtaaactttagattacaggaagaaaggatagcgactatgaggaaagaaatggaaagtcagaatcgtggtctttaccgcgaaagttttgaacatgataactgtggtattggtgcaattgtcaatatcaaaggcaaaaagacacatagtacagtggcaggagccttgagtattgtagaacaacttgagcacagagccggaaaagatgcagaaggaaagacaggagatggcgtgggtattctgacacagattcctcatggatttttcaaaaaagtctgtcagccacttgggatcaagctgaaagatgaaagagattacggtgtaggtatgttctttcttccgcaggatgaattaaaacgcaatcaggcgaaaaagattttcgaggttattgtaaaaaaagaaggattgaagttcttgggctggagagaagttccgattcatccggacattcttggaaagacagcagtagattgcatgccatgtattatgcaggcatttattgaacgtcctgcaaaatacgagaaaggaatcgactttgaccgtcgactgtatgtagtcagaagaatcttcgaacagagcagtgatgatacttatgttgtttcactttccagcagaacaatcgtttacaaaggaatgttccttgtaggacagctgagacttttctttgaagatctgcaggatgaagaatttatttctgcaattgcaatggtacattcaagattcagtacgaacacagcaccgagctggcagagagcgcatccgaaccgctttatggtccacaacggagagatcaatacgatccgtggtaatgcagataagatgcgtgcccgtgaggaaacgatggaggcaggatgtctgaaaggcgaacttcacaaagtacttccagcaatcaatacttcaggttctgactccgcaatgcttgacaacgcattagaattcatggtgatgagtggaatggatcttccgcttgcagttatgatctgtattccggaaccatggatcaacaataaagagatgtcccagaacaagaaagatttctatcagtattatgcaacaatgatggagccatgggatggaccggcgtcaatcttgttctcagatggagatgttatgggagccgtacttgaccgtaacggacttcgcccttccagatattacattacagatgatgacaatctgattctttcttcagaggttggagttctggatattgatccatccaagatcgtgatgaaagaaagacttcatccaggcaaaatgcttcttgttgatactgttgcaggacgcgtgatcgatgatgaggaattaaaagaaaaatatgcaaatcagttcccatatggagaatggctggacagtaatttgattcagctgaaggatttgaaaatcccgaataaggatgtgccaaagtatactgccgaagagtgtacacagcttcagaaagcatttggctattcttatgaagacgtgaaaacttctattctgacaatggcaaagaacggtgccgaaggaactgcagcgatgggaatggatgcaccgatttcagtcctttcgcagaaacgtcagccactgttcggatattttaaacagttgtttgcgcaggtaacaaacccaccgatcgatgcaatccgtgaggaagttgtaacatctacaacaatttatgtcggaacagacggtaaccttctggagcagaaggaagagaactgtaagatgctcagagtcaataacccgatcctgaccaatacagatcttctgaaaattaaaaatatgaaagtggatggattcaaagttgcagagattccgatcacttattataaaaacacaagtcttgagaaggcaatcgagtatctgtttattgaagttgaccgtgtgatccgtgagggtgctaatattttgattctgacagaccgtgaggtagacgaatatcacgttgcaatcccgtcacttctggcagtatccggactgcagcagcatctggtacgtacaaagaagagaacctcagtcgcgatgattctggaaagtggagagcctagagaggttcatcattttgcaacactgcttggatatggagcatgtgcgattaatccatatcttgcgcatgagtcgatccgtcagctgattgagtctaatctgcttcacaaagattattatgcagcagtagatgattataactcagcagtaattcatggaattattaagattgcatccaagatgggaatttcaacgatccagtcctatcagggagcaaagatcttcgaggcaattggtctcaagacagattttattaaccgctattttacagatacagtcagccgtgttggtggtatcggtattgaagaaattgcagaagattacacagcattccatacagaagcatttgatccgcttggactgcaggttgatacgacactggacagtgttggaaaacataaatataaaagtggcggagaagaacatctctataatccacagacaatccatatgcttcagcagtccacaagacgtggtgattatgaaatgttcaagcagtatacagagatggttgatgaggaaggcaagaagatcaatctgagaggtcagcttgatttcaatttcccgaagaagagtgtaccgcttgatgaagtagaaagcgtagattcaatcgtaacaagattcaagacaggtgcgatgtcctatggatctatttcaaaagaagcacatgagacaatggcgatcgccatgaatatgcttcatggtaaatcaaactccggtgaaggtggagaggatattgaacgtcttgacacaaacagatgctctgcaatcaagcaggttgcttccggccgattcggagttacatccagatatctggtcagtgcacaggaaatccagatcaagatggcgcagggagcaaaaccaggagaaggaggacatcttccgggtggaaaggtatatccatggatcgcgaagactcgtcattcaacacctggtgtgagcctaatctcaccaccgccacatcatgatatctattcgattgaggatcttgcacagctgatctatgactgtaaaaatgcaaataaaaatgcaagaatttctgtgaaactggtatcagaagcaggtgtaggaacagtcgctgctggtgttgcaaaagcaggagccggagttatcctgatctcaggatatgacggaggaacaggagcagcaccgagaagctcgattcagaatgcaggacttccgtgggagcttggacttgcagaaactcatcagacattgattcagaatggtctgcgtgagcgtgtccgtattgagacagatggtaagctcatgagtggccgtgatgttgcgattgcagcaatccttggagcagaagagtttggatttgcaacagctccgcttgtaacaatgggatgtgttatgatgcgcgtctgcaacctggatacttgtcctgttggtgttgcaactcagaatccggagcttagaaaacgtttcagcggaaaaccggaatatgttgtcaactttatgcgttttattgcagaagaactaagagaatatatggcaaaacttggtgtccgcacagtggatgaactggtaggacgtacagatcttctgaaagtaaaagacgttccgacatcagagcgtgctgcaacactggatctgtcacagattctgtacaatccatatgcgaaagagaagaaaggtgttatctttaatccaaagaaagtctatgattttgaacttaacaagacattggatgaaaaagtactattgaaacagcttcttccagcccttgaaagaggagaaaagagaggacttgaagtagatgttacaaatacagaccgtactttcggaacaattttcggatctgagatcacaagaagatatccggaaggactggaagaagacagctatgtgatccagtgtaaaggtgccggcggtcagagctttggagcatttatcccaagaggactgacactggaactgacaggagacagtaatgactattttggaaaaggactttccggtggaaaactggttgtttgccagccgaaaggtgtgaaatttaaatcagatgagaacattatcatcggaaatgttgctctttacggagctacaagtggtaaagtatttgtaggaggtgttgccggagaacgttttgcggtaagaaactctggtgcacgcgcagttgtagaaggtgtcggagatcacggatgtgaatatatgacaggtggatgtgttgttgtacttggacaggttggaaagaactttgcagccggaatgagcggcggtattgcctatgtaatcgatctcgataacagcctgtatcgtaaagtaaataaagcaatggtcaacattgaacgtgtcacagataagtatgatgtacaggaattaaaaggaatgatccaggagcatgttgcttatacaaactctgaggtaggtaagaagattcttgataatttcaaagaatatctgccaaaattcaagaagatcattccggaagactatgagagaatgatgtccacgatcatccagatggaagaaaaaggacttagtagagaaaaagcaaaaatcgaagcatttaatatgatcaagaacggaagataggaggcatagagatgggaaaaccgacaggatttatggattatgaaagacaggataaaccggcagagagcccattggaacgcatcaaacatttcaatgagttccatacgcctcttagcaaagaagaacaggaacttcagggcgcacgctgtatggcgtgcggagttccgttctgtcagtctggaaagccgcttgcaggaatggccagtggatgtccactgcacaaccttgtgccagagtggaatgacttgatctacaatggaaattggaaggaagcttatttacgtctgaaaaagacaaacaattttccggaatttacttcccgtgtatgtccggcactgtgtgaaaatgcatgtacctgtggactgaatcaggaagcagttgcatcaaaaagtaatgaatatgcaattattgaaaatgcatatgagatgggatatgcaaaggcaaatccaccgaaagtgcgtacaggaaagaaagtcgcagtgattggttccggtccgtccggacttgcggcagcagatcttctgaacagaagaggtcatcaggtaactgtttttgaacgtgaggacaaaccgggcggattgctccgctatggaattccgaatatgaagctggagaaacagattatcgaccgtaagattgcgattatggaagaagagggaattatcttccggactggatgtaatgtcggaaaagacgtgaaggcggcagatatcctgaaagaatatgaccgcgtgatccttgcatgtggagcatcaaatccaagagatatcaaagcaccgggaagagatgcacagggaatttattttgcagtagatttcctgaaatcaacaacgaaagcactatgggcaaatgacatgaagcttaaaacaggaagctacatttctgcaaaaggaaaaaatgtaattgtaatcggaggcggagatacaggaaatgactgtgtcggaacatctattcgtcatggagcaaagagcgttctccagctggagatgatgccgaaagcaccggacgagagaacaccgatgaacccatggccggagtggccaagagtctgcaagacagattatggccagcaggaagcaatcgctgtgtttggttctgatcctcgcgtttacacaacgacagtgaaagaattcgtaaaagacaagaaaggaaatctctgtaaggcagtccttatcaagcttgagagtaagacagatgggaagaccggacggaaaatgatggttccggtagaaggaagcgagtataccgtagatgcagatcttgttctgatcgcagctggattccttggaagtcaggattatgtaacaaaagcattcggtgtagaagtgaatgaacgcacaaatgtaaagacagaggcaggaaaatattctacaaatgtgaaggatgtattcacagccggggatatgcacagaggacagtctcttgttgtatgggctatccgtgaaggtcgtgaagtggcaagagaagtagatgaaagcctgatgggatatacaaacttatatattcagtagaaaataaaagatcatacagtgaaacaggagtctggaaagtttatctaagaataaagagaactttccagatttttttgttacaaaaatgttacgaaaaaatgaaaaaagtaagggaaactattgaaaatattacataaatacgctataatattgaacgtagaatgtaaataaaataccctcttgttacgagaaatatgttgaaaaaacacaatagatgttgtattataacatatgagtatgtggaattataatgtaactatttacaatgaattgtgatatgaaaaattataatgcatcacatgggggactagataaaaataaggataggtggaaagatgaagttaaaaaaagtaagcagtatgattcttgcagtaacacttgcatgtacaatgactgttacaccggtacttgctgacgaggtcagtgatctgaagcagaagaagcaggagacacagaatcaggtaagtaatcttcagacacagctgaattcacttatgaccaagatctctgatcttgagaatgatctgatcgaaacaggtgaggaaatctctcagacagaggaagatctgaagacagcgcaggaggaacaggaacagcagtatgcagccatgaagcttcgtattaagtacatgtatgaagaaggaacaggcactgctacagtggagaaggtactaacatccggagatatttccagtgtactgacacaggcagaatattcccagcaggtacattcttatgacagagataagctcgaagagtatgttgcgacagttcagaaagtagaagatcttaagacaacgcttgagacaaagatggctgatttgcaggagacacagacagagtatgatgcgcagaaggatgaactgaatacaacaatcacagagaagagtagtgaaatcgcaaatctcgatgttaagattgatgcagctgtaaagaaagcagcggaagaagaagctaagagaaaggcagcagaagcagcaaagaaagctgccgaggaagcagctaagaagaataactcaagcagtagttcttctaatagaaataactcaagtaatagttcttccagtagttcaagctcaagcagctcaagctcaggaagttcaagcagctcaagctccagtagctcaagcagtagttcttccagcagttcaagctcaagcagctcaagttcttcctcgccaagcccaagctatagtgcagataagggaagcattattgtaaatgcagcttattcacagatcggagttccgtatgtatggggcggatctacaccgggagttggacttgactgttcaggacttgtacagtattgctacagacaggcaggaatttcaattccaagaacaagtggagatattcttgcagcaggaacaatcgtaaatgatccacagccgggagatatctgctggacaccgggacatgtagcgatttacattggcggcggacagatgatcgaagcacagcagacaggagtaccggttaaggtaagttctgtacgtgttacatattatgtaagatattagaaccaaaaaaggaatcagtgatgctgattcctttttttaaaactttttttatttgcccggtacaatttccagccagtatccgtcaggatcttcaataaaataaattcccatagatggattttcgaagcagatacatcccatctctttatgttttttgtaagcagcatcgaaatcatcgacagcaaatgcaagatggatctcattatctcccagttcatatggtcgatccatatcacgcagccaggtgagctctaaaagatgcggggtcacaccgtctgtgagatatacaagcttaaaactttcgtcatcggcaagtttttcacgttctacttttaaattcagagctttctggtaaaaatccagtgatttttcaagatcatatacattcaggttattgtgtgcaaatgtaaaattcattttattacctccatagaatcataagatttttattcacagtcaagtggaatgatgactggaatctactttctaaggatatcacaggaggagaggaaaaatcaataatgcatagataaaacctgatgggatagagtgataacacagaatacagtgaaaaatgaatgaaaaacatttttgaaatgcaaaacatgtggaaataaagctgaaaaaaacaagaaaataaaaaagaatgcaagaacccattgacgaaacgtcaaaaattatatacaataacaaaagtgaaaaaataaagaaagtggaggattcctgcaatgactgcatataaagatttgagcaaagaagagttattggaattaaagagtggcctggaggcgcagtttgaagaagtgaaggcaaaaggtctgaaactggatatgtccagaggaaaaccgtcagcagaccagctgaatctgtcaatggggatgatggatacactgacaagtggtgttgatctgacttgtgaagatggtgttgactgccgtaactatggcggacttgatggaattgatgaagcaaaacagcttcttgcagatatgatggaagttccgaaagataacgtgatcattttcggaaactcaagtctgaatgtgatgtatgatacggtagcacgtgcaatgacacatggtatcatgggaagtactccatggtgtaagcttgataaggtaaaattcttatgtccggttccgggatatgacagacatttcgcgattacagagcatttcggaattgagatgatcaatgtaccgatgacatcaacaggaccggatatggatatggttgagaaacttgtaagcagtgatccggcaatcaaaggaatctggtgtgtaccgaagtactctaacccacagggaatcacatattctgatgagacagtgttccgttttgcgaacctgaagccggcagcagaagatttccgtatcttctgggataatgcttactgtgtacatcatttatatgaagataaacaggattatctgattgagattctgatggagtgtaagaaggcaggtaacccggatatggtttacaagttttcttctacatccaagatcagtttcccgggatcaggaattgcggcaatggcagcatctgatgcgaacctggaggatatcagaagcacaatgcgtgtgcagacgatcggacatgataaggtaaatcagctgcgtcatgtaagattcttcggagatattcacggaattgtagaacatatgaagaaacatgcagatatcctgcgtccgaagtttgagactgttcttgaagttcttgaaagagaacttggcggacttgagattggatcctggatcgcgccacgcggaggatatttcatctcctttgatgcgctggacggatgtgcgaaggcaatcgttgcgaaggcgaaagaggcaggcgttgttatgacaggagcgggagcaacattcccttatggaaaagatccacatgacagcaatatccgtattgcaccgtcttatccgacaccggaagaacttgcagttgccgctgaagtatttgtattgagtgtaaaactggcaagtgttgataagatccttgagacaaaataaataacagcattttataaagaccttttgcaagtggttgatctgccggcagaaggtctttttctgatggttgacagttactgttcactcccgtgtcaatcactccgctgattgacacggaggatgcgtgttttggcttgaatgcatctcgcccatcgccaaaggcgatttaaaatggcgagatgcgttgctggtcacacatcgtgtgaacagtaacggttgacatgcgtttccagggagattataatgtagtgcatagcagaaaagaggaatgacatgataaaaggtgtaatatttgacgtagatggtgtccttctcaattccatgcctgtctgggagaatcttggagaattgtatctggatcatttgggaattgaggccgagaagaacctgggggagacattatttgagatgagcctggaggaggcggcagattatctgatctcacattataacctggagaagacagtggaagaggttgtacagggactgaataaagaagtggaagactattatgcaaaacgagttccattgaaagaaggggttcgtcagtatctggaggaattcagagagcggaagattcctatggtgatcgcaacaaccggtgaccggaagaatgcagaagcagctctgagcagattgaaggtattaccttattttcaaggagtttttacagcatctgagatcggaagcggtaaggatcagccggatatttattttgcagcacttttgcagctggatacggagccggaacagacctgggtgtttgaagatacttaccaggctttgagaacggcaaagcatgcgggatttaagacagtagcagtttatgataaggcaaatgacaagaatctggcgcagatctggaatacggcagatatctatttgccggaatttgatgattttaatgttttttggaacagggtgtctgaggaagagaaagaacagttgctgattgtagaataagaggagaatgaaaaaagcagattcgaattcaaaggagagatgctccggtagaattcgaatctgctttttatcatataattggctggtctgtcttgtgtttagagaaggtgaatgccggcatcagcagcagcttcaactacattttcaggccagagggaagactgtacttcaccgatatgagcctttcttaagtaatacatacagatacgggactgtccaataccgccgccgactgtatatggaagctcgccgttcagcagtgccttctggaatggaagttctgcacgatcttcacatccggcttcttttagctgtgcctttaatgagtcttcgtcaacacggattcccatagaagagagttcaagaccgatgtcaagaaccggatagtaaacgataatgtcaccgttcagctcccagtcatcatagtccggagcacgaccgtcatgtctttcgccggaagcaagtacgccaccaatcttggagataaacactgcgcctttttccttcgcaatcgctttttcacgttctttggtagtaagatccggataaaggtcttccagctcctgtgtagtgatgaaaaagatatcatcaggaagaagaggatcgatatagttgtaacgtctggaaatgtattcttctgtatctttcagagcccggtagactttgcggacagtgtactgaagtgtctctgtgttacgttcttccttagaaattactttttcccagtcccactggtcaacatacagagaatggatgttgtctgtatcttcatcacgacgtatcgcactcatatctgtgtaaagcccttcgccggaatggaaattataattcttcaatgcatatctcttccattttgcaagagaatgaacgatctctgcaacagaaccatcctgttctttgatgtcaaaggaaaccggacgttcaacaccgtttaagttatcattcagaccggattccggacggacaaacagtggtgctgacactcgtgtcaggtggagattctttgcaagagcacgctcgaagtggtctttcacttctttgatggctacttctgtctcacgaattgtaagaggggaatgatagccagcaggtattcttaactgttccataataaactcctttatgttagcattttattgctgttcacagtattatgcggtcagcaatagcatttctcttctattttaagtggagaagaataagaagtcaatggaaaggtgaaatgaacacttgtaatcagtaaaaaaaattgctaaaatgagcagtagtgagtaataaatagtaagggacgaaggtgtaaataatgaatgtaaatgatatgattgatacaattctgaattttgacctggatgttgttctggctggacttaatgaaagcagtcatcatttgagtcagatggaatttatttctctgatcgttataatggccggagcggtactgttatgtctgacggggctgaaactggtacgtttctggtctgtgatcgcaggattgtcagcaggatgcgcagccggaattgcggtcggagcgattgcagatctggatcagacaatcgcattggcggcaggagcaggtgtgggacttgtattggcggtgcttggtgcatggaagaagcagattggtggatttgtgacagtagcggtactcgtctttgttgtcagtgtacatttgatgaaaccacaggattttattatctatggaatctgtgcgggtattggtcttgtgtgtgcattgctttctattaagtttcataactttatgctgattgcttcttcttctgtgtttggagcaatggcagcgggcagcagtatcttttatctgcagccatataaaaacggaatgatccatgtggcactttgtgctgcaattggtgcacttagtatctggatccagcttcttttggaatccggaaaacgtaagaaaaagaatttacttaaagccgcagagatccgtgaagaacattctacagaaaatgaagtcgagaaggcaagggcactggtcgagaatctggatgattttgatgagctggatgagattatagagagtcttccggaaaatgtcctgaaagaagacaagggcacaacagttgtcagcatggatgaatttgatgatcttgaagatgatctggaagaggatgaagtggagaagtttaaagaagagaagtttgatgtagacgaggaagactgggaggaagacgtcgaaattgaagtaactgctgatgaggcagatgcgacagaggattatgattttgatgaagatccggatgacttagatgacttgaatgatctggatgatttagattatcttgatgacgatgatgatatcgagtttctggatgaagatgagtagataaaaaagctatcgattacaataacttaacacatatctgtgttgttatcgtagtcgatagcttttgtattatcttactgctgtaaatactccgcggagatcatggattacatgtcttggacattttacagagcacattccacagcttaagcagatgtcttcctggattactgcgcaattatcttctacatgaattgcacctgcagtacatgttttttcacaaataccgcatccaatacaactgacttcacactgtttacgtgcaacagctcctttttctttgttagagcattttactacaatgtagtttgcacattcgtgaatcttgatcaggttctgtggacagacttttgcacactgtccacaggcaatacatttttcttcgtctacttcggcaacgccatattcattcatggaaatcgcgccgaatttacatttttctatacaggctccacatccgatgcagccatctttgcatccgccgtcttcagagccggctgcgcggcagccaccgttacaggaaaccagagctgcccggtaaggaaatctctttttaattgccatgattatttcttcctttcgtatggtgtgttagaaagaggaaggctgtagcgtctttctccgtcaaatctgcaatatgcatccgcgattgcaggagcagtagggatggatgtgatctctccgataccgattgctccacaggcaacatccagaccaggtttatcaataacgattgcttcaatctcaggaacttcgtgagaacggaaaagtcctaaggaaccatatttgtcaattggtttacaattttcatcgattggatactgctctctgagtgcgaatcccatagacattacaacaccgccttcaatctgaccttcgcaggaaagtgggttgacagctttaccaacatcgtgtgcggcaatcattttctcaatcttacctgtcttaggatcaaggatgcagacctgagttgcatatccataagcaacgtgagatatcggattaggcacatctgcaccaagtggatgagtcttagcgagatactctccgtagaaagtttctccaatcatatctttcatggacttaccgctgttttttgcttccatgaatttttcacatgctctgcggcacgcttcaccggttacaagtgtctgacgagaaccggaagttgtaccggaatcaggtgaaatccatgtgttgcttcgctcatagacgatatcatcatgggaaagatctgtatttgtaacgatcatctgtacaagtacagtaccaagtccctgaccgatacaggaagcaccagtgaagatgtgaagtttttcatcttcttcaacaattaattttacacgtcctgtatctgggataccaacaccaacgccggcattcttcatagcacaaccaaggccaacagccttaccggccgcaagtgcagcatcatactcttctttgacagcttccagtgtctctacaagacctgtagagttatctacaatctgtccgttcggaagtacttcgcctgggcggatcgcattgcggtaatgaatctcccaaggtgtaatgcctaccttgtcagccatcatgttcagaagtgtctctgttgcgaaacaagtttgtgtaacaccaaatccgcggaatgctccggcaggtgggttatttgtatagtaagcagttccttcaatttcaaagttttcataatgataaggtcctgctgcatgtgtacatgcacgttcaagaaccgggccaccaagagaagcgaatgcacctgtgtcagatttaacaatcgcttttacaccctggatcactccattctcatcgcatcccattgtcatatccatgtagaatgggtgacgtttcggatgaacaagcaaggattccgctctggataatttcatcttgatcggtttctttgttacgtaagtaagcaatgcgcttaaatgctgaacagtcatgtcctctttaccaccgaaaccaccgccgactaatgcgttctgaacttttactttatctgttccaagcataagtgtaacttcgtgcaatgtctggtgagcggactggtctgttgaatatacgaaaatgtcaccgtcttcatcatagaaagaaacagcacattccggttcaaggaaagcatgctcagtccaaggtgtctcaaagtgatgtgagatcacgtacttggaattcttgattgcttcttccgcatttccgcggctgatgtgcttataagcacatacgttagtctcttcttcatcataaacaagtggagcatccggagcagcagcttcttccactgtatgcacatgaggaagtacttcatattcaactttaataagtttctttgctttttctacagttgccatgtcagttgcagctacaagggcaattgcatctccgagataatgagtcagtccaccaaccggaatcagtgaatactgatcatgttttaagtgtccgatcttattctccccaggaatatcatcggctgttacaaccgcttctacgccaggcagagcctcggcagcagaggtatcaatagaaagtacgcgagctcgtggatatttactacgaagagcagcgccatagagcattccttccggataatagtcatccggatatttacctgttccaagcactttttcttcaacatctatacgagaaacacgggaaccaagagtccagctaggatctccgtcatctggtaaaactccttctttcagaatcttagctgccagacgtaccgcgtccatgatcttaacatatcctgtacagcggcaatagttgttgcgcagcgcatagcgaatctcatcatcggttggttccggatttacatccaaaagtgcttttgtgcacataaccataccaggaatacagaatccgcactgtacagcgcctgccttcccgtaagcataagtgtaaactttctgttcccaatcagaaagcccctcgactgtgatgacattctttccggccaatgaatctgtgtcaggtacgcaggatttgcaagtctgtccatcaatgataacagtacaggctccacaagcgccttcgctgcaaccatcctttgcagaggtaatgtgcagttcatcacgcaggaaccgtaacagtttctgattctttgaaggtgagacttcctgaccatttactataaatgatgccatgtcagttactcctttctttgtaacaaaatccccaaagaaaaatctttgaggagtatgtgtttgttgtgtatttttaattatataaagatacctatggttatattttatcacatattcaacaaaaatcaacaactattctaaaaaagtttttgacacctaaaaatattttagatatatgatataaaaaatgcatattaggacaaaaaaagggaagtatcgcaaaatgatactcccttgtaattatcttatataaattgttcttagaaaccaaaaagatttacaacgcgattttaattatcgtgttcttcttcaaatggatcgtcgtaatcatcttcatcatcgtaatcatctccaccgcgggaagcaattgcgagaatcagtgaaataacagcaagtacaccacttacaccggctaaaatcagaagctcgaattcatctccatgtttcaggaaagcaaaaacagcactaccgatatagacaatcatcgggataaggaatgcaaaaagtgtatcacggttattcatgatgaagtataacagtgcagtgacaagcatacaaagagcaacaatgacataattcatgcctggagcagaagttacgtcagctcctgatgtgctgagtcctgttacgaaacctttataaatacagaaaccaaatgcaagcagggaaatgattccaaggatgatgcgtccaggtctgaaacgtggatattcgtctacgtattcatattcatcatcatcttcatcatcagaggatttctcatcatcatagtcatccatttttctggattttacatcttcttttgctttcgcagtttcggcttcctctttctttttcttcttggcagctttactgtcagggtcagttgcaagcatatcttcgtatcccttgcgaactgctttttcacgcttatcacggatttcttccgctggaatgttcccatatttctgctcttcggaattatcagtggcagtggcatcagtggcagctttctgtgcggcggctttgcgggctctggctctctccttaagaatacgttcagcttcttcttctgaaatccctttgtcagcagcaaggcgggcaatcgcttctttgcgggcgcgggcttttgcttctctgcgggcagctcgtttctcttcagcggcacgggcggcagcatcagctttcgctttctcctcagcggcacgggcagcagcttcagctttcgctttttcttcagcagcgcgggcggcagcttcagcttttgccttctcttcagcagcgcgggcctcagcctcagcttttgctttctcttctgcggctttcttggcagcgatcttctttgcacgttgtttatcaaggttccattgctttttacagctatggcagattgcatattcattaaagattggatccccgttttcgctggtgccaatctgcttattctgcaaatccaggtcttttccacatattgggcacttcatattaatcatgtactcctctcttttgtatcaaaatatttataacagatttattatagcatcttaaaagaggaagaacaacgaaaaaagtgtgttttacataaaatgttttagaaaaaaatcaaaattgcgcaagaatttagtttaaatttataagaaatggtggactttaaaaatttaatgtgttaaaatcaaaaagtggcctgagaaggcaaaaggtattgttatggtttatggtatgccgtaagccatcatataattagccggttgagaaggagattgtttcgtatgagtaagaagatcagaaccgaggcagtagattatttgtttcaggcaatcttaagccttgagaataaagaagagtgttatacattttttgaagacatctgtacgatcaatgagctgctttcattgtcacagagatttgaagtggcaagaatgctccgtgaacagaagacatatttggagatcgcggagaagacaggagcatccactgcgacaatcagtcgtgtgaaccgttctcttaattacgggaatgacggatatgatatggttttcaaacgtgtagggcttgctgaggaagagaatggaacggaagaataacacttaagaattaagcttacaataaaataccttttatcaatcaaaagatacagcttgcggaagatcctgataaagtctttcgcaggctgtatctcgttttaaacagaaatgtttatttccctttctttttctcttcgttttttgaagacttggaagagaggtcatcaatgatccgttcaatgatcattttcttgatatatacatcaaaactcaagctgcatataaatgcaaactgttgtaagatctccttatcttcgccatcagcaagatgagtgaaagtctcagcagatttctcataagtagcagttacattctctttgatggaatccagctgttctttttcaatcttgcagacttctttgtaaatattcgctaattcaaaagagcttccatccggaaaatatttctctgtgagcggtgcaagaactgtctcaatatctttgattgaaaggatatttttaaaataataaatgaagaccagaaggagcaggtgctctctggaatacttcttcttcaccgggggtggaagaagattgttcttcgtataattattaatcatggtctttgtcagaatcttatcatcagggtaacgtttggtcgaagccagttgctcatccataaaagtagttacttgatccatgtaaagatcaatattcggaacatcgccgggatgcacataacttaaagaagaaagttcttccaaaatgctgtttaacagattacttgtgtctatattcatgttatcacctcaatacatttattatatagtatttaaaactagatagcaagcaaaagataagaaggccggaaaatgtagttgacaaacaggaacgtgtgtttgataatgggaatacatttacagatatctttataactttaaaggagtggaaagatgagcatttatgataaattaaatgaaccgcagagagaggctgtttaccacacggatggccctcttctgatccttgccggagccggttcaggaaaaacaagagttctgacgcacaggatcgcatatctgatcggagaacgtggcgtgaacccatggaatattcttgcaatcacatttacgaacaaagcggcagaagagatgcgccaacgtgtggataatcttgtcggttttggagcagaaagtgtatgggtgagtacatttcattctgcatgtgtgcgtattttgagaagatttattgacagattagggtatgagaatcattttactatatatgatacagatgatcagaagacattaattaaggaagtctgtcggaaagtagatgtggatacgaaagtgtttaaagaaagaagtctgctttcagcaatttcatctgcaaagaacgagatgatccttccggatgaatttgaactgaatgccggaggagactttgcaaagatgaagattgctaaggtttaccgcgagtatgaggcgcagatgagggcgaataatgcgctggattttgatgatctgcttgtaaagacggtacagcttttgcagacacagccggatgtgcttgagagttatcaggaaagattccgctatattatggtagatgaatatcaggatacaaatacagtccagtttcagctggtaagccttcttgcaggaaaatataagaatctttgtgtcgttggagatgatgaccagtcaatctacaagttccgtggagcgaatatccggaatattcttgactttgaacatgaatttccggatgcaaaggtgatcaaactggagcagaactacagatctacagggaatattctgaatgcagcgaacagtgtgatcgcgaataaccgcggaagaaaggagaaatcactttggacggagaatggagaaggtgaactgatccgtctgcgtcagtttgatactgcatttgatgaggcggatttcataggcgaagatatcaaaagtgctgtcagacagggaggttcctataatgacagtgcagttctttatcgtacgaatgcacaatcccgtctgctggaagagaaatttattgctatgaatattccttataagattgtcggcggtgtaaatttctatgcgagaagagagattaaggatcttcttgcttatctcaagacaatcgacaatggacgtgatgatgttgcggttagaagaatcattaatgtcccaaagagaggaatcggtcttacaacaattaaccggattcaggagtctgcaacagaacgtggaattggtttttatgaggcattactggcaccggagctgatcgcaggagtgggaagaagtgcaacaaaactggactcttttgcggcattgatcgagtattttaagacgttggcagaagagatgaacatcacagatcttttacaggaagtgattgagaagacaggatatatagaaagccttgaaaatgaagataaagaagaggcgaaaacaagaaaagagaatatagacgagctgatcagtaaagcggcaacttatgaggaaagttgtcaggataaagatgaaaaggcaacattgagcggattccttgaagaagttgctttggttgcggatattgacagtctggatgaagaccaggaatatgttgttctgatgactttacatagtgcaaagggacttgaatttccacgtgtttatcttgcagggatggaagatgggcttttcccgggatatatgagtattaatgcaggagacagagaagaactggaagaagagcggagactttgttatgttggaatcacaagggcagagcaggaactgactttgacaagtgcgcgcagaagaatggtgcacggtgagacacagtacaatccgatgtcaagatttgtgaaagagatcccgagggaactgcttgatacaggaaacaagaagtttacccaggagacggagatgccagcacagcagaatacatatgcacgtgccagggaagcgttcagggcacaggcatttggaggaacatttggcggaatgacacctgcgaagaatcaggggacaggtaagccacttacaggaaatcaggcactggcatccttgcagaaaggcagtcagctggcagcaggtggaaatggtccacttggatatgaggccggagaccgtgtgcgtcatgtgaagtttggggaaggaactgtaactgagatcaaagaaggcggaagagatcacgaggttacgattgaatttgacagtgtcggaacacgtaagatgtttgccaaatttgccaagcttgtaaaggtatgagaaagttataaaaaaatgataaatcagtagtaatatgaatcgtcaggtgttataataaacacagattatctgtcaccgcaaaaggtgaagaaaggacgtgttaatatgaacaagagaatagaagacatcattgcagaaacaagattgaacgagattcttcataagaatgaggctgagaagcagaagaatacagtaatctggacactggctatcatcggagcagtagcagcagtagctgcaatcgcttatgcagtatatcgtttcgtatcaccggattatcttgatgattttgaagatgattttgatgacgattttgatgattacttcagcgaggatgatcaggtataattcttgagtgaattgcaaaagtgcagacagggtgagagaagaaaccatcctgtctgtttttctgttaaaatagattagaattgataggagattaggatgaaaaaaggtcagatctacgaggggattattgaacgtgtagatttcccaaacaaggggattgtatttgttccggaggaagaacagtatgttactgtgaaaaatgggattccgggacagaagatccgttttatgataaataaatttaaaagaggaaatgcagaaggaagacttcttgaagtgttggagaaatcttcattagagacaagagagccggtctgcagtatctttcctgcctgtggcggctgtatgtatcagacaatgccatatgaagagcaggtgaagatgaaagaaggacagatccgcagaatcatggatccggtagtaaaaggtgaatatgtttttgaaggtgtgaagcacagtccgaaggaattccattatcgtaataaaatggaattttcttttggagatgaattcaaagacggtccgttatctctcggtcttcataaaaaaggaagtacttatgatgtactgacagcaggagactgtcagcttgtccatgaagatatggataagattcttctttgtgtgcttaattatttcaaagaaagaaatgtaagttattataagaaaatgcagcatgtcggttatctccgccatcttcttttaagacgaggcgatacaacaggcgagattcttgtgaatcttgtaacgacaacgcaggaagaatatgacttaactccattagtagaagaacttctggcattagaattagaaggaaagattgttggaatccttcatatattgaatgactccctgtccgatgtcgtgaagagtgatgagacaagaattctttatggacaggacttcttttatgagaagcttctcggactggaattcaagattacaccattttccttcttccagccaaactcaaaaggtgcagaagtgctgtacgagactgtaagagaatacattggagatattgataatcaggttgtattcgatctgttcagcggaacaggaacaatcggtcaggtgcttgctccggttgcgaagaaagtgatcggtgtcgagattattgaagaagcagtcgaggcagcaaaagaaaatgctgtccgaaacggactttccaactgcagatttattgccggagatgtgtttaaggtacttgatgagattgaagagaagccggatgtgatcgtactggatccgccgagagacggaattcacccgaaggcactcccgaagatcttgaattatggggtggataagattgtatatatttcctgtaagatgaccagtctggcacgtgatctggagatgatgcagctggcgggatatcgtgtggagaagatgacggcggtggatcagttctgcgagaccgtgcatgtcgaagtcgtgtgttgtctacatcgggtgaattcgtagaagtccttaatttccgcgaagacaatgaggagagttccgaagaaacaactggctgtaaagccagtgtttatgcggaatttgacgaatgtacgcgatctgagaatttcatagaaattctcagattcaggcactttacgaggtatatgagtttcacaccaacaggtaaacagggcaagaaaaaccgaaaggacgcttgttttcagaacttctggaagatgagtgtccttttcttttattcaaaggcaaaggagaaaataaaaaatggcaatgaagaaagaaatatgttcatcagagaatcacgagccgggtgcagatgcttcgtaaggcaaatcccgatatggaggaaacagccattccggttgaacttgtgacctgttccggcagcggacttgatcagcatatctcccctctcaaaagatttcagacttctgctcatctttacacaatcttaatttcaaaacaaacttacttacgcccatttaatacaaataaagatagaataaagaaaatataaaaaagaaattaagactatggggatatagttatgcaacagacaaacagatcaagacatcgacatataacatcatttcaagtgattagtttagggtttttatccgcgattctcttaggcagtctgcttttgatgctgccgattgctacaaaaagcggtcagtgtacctcctttttggatgctttgtttaccgcaacttctgcggtttgtgtgacgggactggttgttaatgatacggcaatctactggtctttatttggccaaggagttattttactgctgattcaaatcggaggtatgggaattattacgattgctattgcgattgctgttgtttccggacgcaaaatcgggttgatgcagcgaagtaccatgcaagaggcaatttcggctccaacggtgggtggtattgtgcggagaacacaatttattattcggactactattcttatcgaaatcattggtgcggttcttttagcccctgttttttgcagggactttgggttttggaaaggaatatggtattcactgttccattctatttctgctttttgcaatgcaggatttgatctaatcggtataagaacccctttttcctcgttgacctcttattctgtacagccgattgtaaatcttgtaattatgatgctgattattgcaggaggtattggattccttacctgggaggatataaagaatcgtaaatggcattttaaaaaataccggatgcaaagcaaggtgatttttatggtaacaggaatattgatattcttaccggctctttattttttttattttgaattttcaaatgtgcctcttacagaaagagtatgggtttctttgtttcaatccgttacgccgagaacagcaggattcaatacggcagatttgactttactcagtgaagttgggcaaatgcttatcattatgctgatgctcattggtggctcgcctggttccactgcaggtggtatgaaaacgacaactcttgcagttctcgtttcatcggcattatctgtatttagaaaaaaggaacacacccattttttcggcagacaaattccggatggcactatcagaaatgcagctacgatttttttgatgtatatcgttttattccttgtcggaggaatggtaatttgcagaacagaagatattccacttatgaccgctttgtttgagacggcgtcggcaatcgggacggtagggttatcgttgggaataactcctgacctggggcttgtttcccatataatcttgatttgcctgatgttttttggcagagtgggaggattgaccttgatttttgctaccatttctgaaaaaaagcctaacggttcaaaatatcctcaggaaaaaattacagtaggttaaggagaataaaaaaatgaaatcaatattacttatcggtctgggaagattcggacggcacattgctataaaattagatgaattgcatcatcaagtgatggcggtagataaagaagatactcgagttgatgctgtacttccctttgtaactaacgctcagattggggatgcgactaatgaggattttttaagttcgcttggtgttggaaattttgatgtttgtattgtggctatcggagataactttcagagttcattggaagtaacgtgccttttgaaggaactcggtgcaagaatggtggtgtctcgtgccgctcgtgatgttcatgcaaaatttcttttacgaaacggcgcagatgaaattgtttatcccgaaaggcagcttgccgattgggttgcgatccgttatagtgctgatcatattttcgattacatagaactagatgaagaacatgcaatctttgaaatatctataccgggagaatggataggaaaaacaatcggtcagttggatatacgaaaaaaatatgacatcaatattatggcgctgaaaacaaatgatattatgaatttgaaaataagttccgatacgcagttgttaaagggcagtaccatgcttgttcttggggagacgaaacatattcaaaaatgttttcatatttaatttttgaaagaagttggtgatatgaaagactttgttttacttatagtggtattggtagcatttatttatggttattttcttatggaaaagctggataaatttctcaaggaaaatcaatctcaaaaacttatttcagattctaagctcaggattggatttgaaacacctgcaatcatagattctattgcagatctattagaacaattttcaagcgaatacccaaactatgagctgaacctgttctatggttctgtaagtgaaataataaatgggttggaaaataataaacttgattttggctttatcatagaaaattccaacgatattttgaaagatgagtattgttccttatcctttcaaataaagcaaagtgtcattactccaggctctatagacaatgcggtacatcctatcaatacgattgagaaaccagcgagagtgatatggcaaaatgacattaattgtatgaagggtctatttgtcgaaaaattgcgtgatttttcggagcgttttctgttttcggctacacgcccgaatggaaaaaaagaagaaaaggtggtataatctttgtgcgattttaatgtcagtgctaaaatgcttttctgaaatttacgtattattctatataatgtttttgtacaaggagatgaccgtatgagtgaaagcagacacaatccggatcagttattaaaggaaatccaagctgatgaagaaaaacgtaataaaggacatttgaaaatctttttcggatatgcagctggtgtgggtaaaacctacgccatgttagaagcagctcatatggaaaaacagcagggaattgacgtggtagccggttatgtagaaccccacgcatgtcccaaaacagcagctcttttgaatggcttagaagttcttcctacaagagaagttttttataatggtatgatactggacgaattcggcattggcatggcgttgaaaagaaaaccacagcttatccttgtagatgaacttgcgcatacgaatgccgaaggatgccgtcatgcaaaacggtatcaggacattaaggaacttttgaatgcagggattgatgtctatacgactgtcaatgttcagcatattgaaagcctttgtgatacagttgcatccattacggaaattgttgtacgggaacgcatcccggattctatttttgataatgcagatcaggttgaattaatagatattgaaccacaggatttgatcaaccgtttgaatacaggaaatgtatacagacagacacaggaaaaacaggcagtagaaaatttttttacaatagaaaatttgacagctttccgggagatttcactgcggcgatgtgcggatcgggtgaatatcctcacagaaaatacccgcataaaaaatcatggagattatcacacaggcgaacatattcttgtatgtctatcttcttctccatccaatgcgaaaattatccgtaccgctgcaaaaatggcttctgcttttaaaggggagtttacggctctatttgtagaaaccccagattttttggtgatgagcgaggaaaatgtaaaacgcctgcgttcaaatatttgtcttgctgagcaacttggggcaaaaatagaaacagtttacggagaagatgttccgtttcagattgcggaatttactcgtttgtccggtgtgtcaaagattgtgatcggacgtagttctgctacaaaacggcatttgctcagcaaaccgactctgacagaaaaattgattgattatgcccctaacctggatgtgcatattattccggatacggtttctaatgcggcagtgtatcagttaagagggggcaggaaaaagaatcatatcgtattctctgtcactgatacattaaaatctgctgcgattctgattttatccagtttagtcggaatgattttccagaaatttggatttgacaaagcaaatatcattactgtttttgttttaggtgttcttgtcaccgctgtcatcacgaaacatcagatatacagcctaatttcctcgattgtaagtgttttggtctttaatttcctgtttacggaacctcaatttaccttgcaggcgtatgatcagggttatcctgttacctttattatcatgttgttggcggcatttttaaccggttctcttgctatacggattaaaaaccaagcaaaacaggcggcacaatctgcttaccgtaccaaagtgttatttgatacaaaccagctattgcaacaggcaaaagataaaaatgaaattgtatctgcaacttcaaatcagctcattaaactcttgagaaaagatatcgttttttatttagctgatggagaagtgttggatacgccgcatattttttctgtaactgaagaaaatttggaatcgtgtatttccgaaaatgaaaaggccgttgccggctgggtattgaaaaacaataaacgtgccggagctacaacaggaacgctttccaatgcaaaatgtctgtaccttgctgttcgcagcagcagtatggtatatggagttattggaatcgtgatgggggaaatacctcttgatccatttgaaaacagtattctactatccattctcggagaatgtgctctggctttggaaaatgagaaaaatgcccgtgagaaacaggaggcggccgttcttgcaaaaaatgaacagttgcgagcgaacctgctgcgtgctatttcacatgatttgaggacaccgctgacatccatttccggtaatgccagcaatcttttgtccaacggtgatttctttgataatgatacaaaaaagcagctgtacatggatatttatgatgattccatgtggctgattaatcttgtagaaaacttgctggctgtaacccggattgaagaaggacggttgaatctccgtataacggaagatttgatggatgacgtgatcacagaagcgttacatcatattaaccgaaagagtgaagaacatcatatttccgttgaaagcaaagaagaatttcttcttgcaaaaatggatgcaaagcttattgttcaggtaatcatcaatattgttgataatgctatcaaatatacacctaaaaactctcatattgttattcggacagaaaagcggggaaaacaagcaatcgtatctatatcggatgacggaaacggaattgctgacgaaataaagccacggatattcgacatgttctatagcggtgccaatcaaattgcagacagccgccgaagtttaggactcggattatctttgtgcaagtccattattaacgcccacggcggagaacttactgtctcagataatctgccgcacggaacagtatttacatttacattaccggcaggggaggtcaaagtatatgaataagtcactaatattagttgtagaagatgacacatctgtcagaaatttaattacaacaaccttaaaaacgcacgaataccgatatctgacggcacccgatggtcaatcggcaattttagaaacatcttcacacaatcctgacattgttttacttgatttaggacttcctgatatagacggtgttgagattattaaaaaaatccgtacttggtcaaatatgccaattatcgtaatcagtgctcgcagtgaagataccgataaaattgatgcgttggatgctggcgcagatgattatttaacaaagccattttctgttgaggaactgcttgccagactacgagtcacgcaaagaaggttatcgatgatgcaaaaagtatcccctgccgaagcggttgtttttgtaaacggaaaacttcgtgtagattatgctgcaggttgtgcttatttgaatgaagaagagttgcatttaacacctattgaatataagctgctttgcctgttgacaagaaatacaggaaaagttctgacccatactttccttacgcaaagcatttggggaagtagttggaataatgatattgcttcccttcgtgtgtttatggcaacacttcgtaaaaaaatcgagaaagaaccaaactctccacaatatatccaaacacacattggcgtggggtatcggatgctgaaagttgattgaacttcacaacatttattataatcagtgaggtggcggatatcttttcaagtaataatgaatagaatacatcactctgtaaaagaagttataaggtaagcgaacagattggtatagcttgttaaaaatatatcaaaatcacattgttattttccttaaggtgtgctatagtatattttagtcgtgaatcggaaaaattaggaggaaaaaacaatgaacttaagagaaaaatacggtgagtggggtatcatccttggagcaacagaaggcgttggaaaagcatttgcagagaaaatcgcatctgagggaatgagtgttgtcctggtaggaagaagagaagagaaacttcaggagcttggaaagagtatcagcgaaacatatggtgtggatcacatggttatccgtgcagattttgcacagtccgactgtactgacaagatttttgaagcaacaaaagaccttgatatgggattcatgagttatgttgcatgtttccatacatttggaaaattgcaggatactccatgggagaagcatgagcagatgatcaatgttaatgttatgacattcttgaaatgcttctatcattacatgggaatctttgcaaagcaggatcgtggagctgtaattaatgtatcttctttgacagcaatcagtagttcaccatataacgcacagtatggtgcaggaaaatcttacattaagaaactgacagaagctgtggcagcagaatgtgagagtacaaatgtagacgttgaggttatcacgttaggaacaacaattacaccaagtttgttaagcaatcttccaggcggtccagcaggagaagctgttatgaagactgctatgacaccggaagcttgtgtagaggaagcatttgacaatcttggcaaatctctttctgttattgcaggtgagcacaataaagcaaatgttcataattggcaggcaaataaaacagatgatgaatatatccgttatatgggttcattctattctaacaactaaaaaatcagattttagatgaatcatctttcagtgattatagtagctgtttctctgagtgggggaagcagctattttttatctattttggactcccaaaggttggattgtctatatccgcggaagtatgcggagctgtgggattagggcttttgggtggaagctacatggcagagagttttcgaagcgagcttgaggcagtgccggtgctgcaaatggaatcggcactggcattgggaatgaactgtttgcagatgtttcggtctgtgattcttccacaggcattttctatcagtgtaccggcgattgttgccaatatcatcttcttattaaaagaaaccagtgtgttttcagcaatcagcctgatatcagttgttctcagtatggcattcggaattttacttggaatgattaaatgaaaactattataaaataagtctggcttttttaaatagaatgtgataatatagtaatgtttgatagaggcgcggtgatatgagtatccgctgacgagagtcttgggaagactgtcagtgagagaaaggagaagccgccgaaggaatgatattcccagatatgattcctgggccggatgtagaagatacgccggactgtcacaggtgtggagagctatcgatgacgctagaattattatgccatgggtgactcaccagcagagagtgcctatggcattttttgcgtttagagaatcccaggcgaaacccactatgcttacacacaaacttaacaaacataagtttataggaaaggaaaaaagaaaatgagaaacaaaagaaaaatggggtatgtgtttctgatgtctctgctcattctgtgttgtagttcaacaacagtatttgccgcagatacatctgccgagtatgtacctcagctctatgcaacaatctggtctctggtgccgccggtcgttgcaatcgtactggcacttattacaaaggaagtttatagctccttatttgttggaattttgatcggaggtgtattttggtcaggatttaaaccggaagctaccatcttacatgtatttcaagatggtatagtaggagttcttacagattcttacaatatgggtattctggtattcctggtaatccttggtgtcatggtatgcatgatgaataaagccggtggttccgcagcattcggacgctgggcgaaagagcatatcaagacaagagcgggtgcacagcttgcaacaatcacacttggagtgctgatttttattgatgattattttaactgccttacagttgggagcgttatgcgtcctgtaacagacagccacaatgtatcccgtgcgaaacttgcatatctgatcgatgctacggcagcaccaatctgcattattgcaccgatttcttcctgggcagcagcagtaacaggatttgttaaaggggaggatggattttcaatttttattcgtgcaatcccatataactattatgcaattcttacagttataatgatggtaacactggttcttgcaaaagaagattatggtccgatgaaggcgcatgagaaaaatgcgattgaaggggatctttttacaacaggagacagaccatttgaaaatacatccgaaaatgcgatttacaataaaggaaaagtaatcgatcttgtattcccgattctgtcacttattgtctgctgtgtcattggtatgatttattctggtgggttcttctcaggaacaggctttgtagaggctttctccgaaagtgatgcatcggttggactgatgcttggaagtttctttgcaatggtaattacaattgttttttatgtagtaagaaaagttcttcgtttttcggattctatggcttgcattccggaaggatttaaggcaatggttccggctatcctgattcttacattcgcatggactctgaaagcaatgacagacagtctcggagcagctccattcgtagcttctgtaatgaattcagcagcaggcggattgatgaaccttctcccagcaatcatcttccttgtaggatgtttccttgcatttgcaacaggtacttcctggggaacattcggaattctgattccaatcgtagttgcagtattccagggtacgaacgagacaatgatgatcatctcaatctcagcttgtatggccggagcagtttgcggagatcattgttcacctatttcagatacaacaatcatggcatccgcaggagcgcagtgtaatcatgtaaatcatgtatccacgcagcttccatatgcaatgactgtagcagcagtttcctgtattacatatgtgatcgcaggtatcttgcagaatgcagtcatctgtctcgtgatcggaattgctctgcagattggagttctgcttgcaatcaaagcaatcacaaaagatcacacaggtagggtgaaaacaacaaactaaaaaccagagagaaagcgaggagttgatcctcgttttctttttacagaaatgtagtaaaaaaggacgaaatgaaaagcttgttaagcggttcatttcgtccctgtttgttttatgaaatcttatttatccagatcttttcctgtcagcatcttatatgcctgaaggtatttctcaatcgtcttatctacaatttcctgtggaagtgtccagtcgttgtctggatttgctttcagccagtcacgggcaaactgcttgtcaaaagatggctgtccatgtccggcttcataaccatcagcaggccagaaacgggaactgtcaggagtgagcatctcatctccaattaccatatttccattttcatcaagtccgaactcaaattttgtatctgcaataatgatacctttgctcagagcatattcagcacatttcttatagagagcaattgtgttgtcgcgaagtttctcagcgagttcacgtcctcttccagggtaatatttttcaaggtgatcaacgctctgctcgaatgaaatgttctcatcgtgatctccgatttcagcctttgtggaaggtgtatagattggttcaggaagtttgtcagattcctttaatccttccggaagtgtgattccacaaacagttccgttttctttatagctttcccagccacttccagtgatataaccacgaacgatacactcgattggaagcatttcgagtttcttacacatcatagattttccatcatatttctcctgctggaagaactccggcatatcttttacatcaacagagagcatgtggttaggaagaatgtcttctgtcagatcaaaccagaatttggacatctgagtcaggacagttcctttctttgtgacttcattgttgagaatcacgtcaaagcagctgatgcggtctgtagcaaccatgattaagctgtctccattatcataaatttcacgaactttaccttctttgattggttttaattcctgcattttttcacctcatagaattttcttagaatttacaacgtaaccgtacactttttaggggaaactgtcaagcgggctgaaaacgtgggaagagaggtgtgaaaaatcaatgaagaaggaaaaatgtggaaaattgtgttttttgtataaaaacaatggaaaaataaagagagtgattgtggaatacgttgggtaaaaagtaaaaaaaacagaatgtttttgaggtatcataaacaaatcagatattatttaataagaaattattatagtagaaaaggcagttacacagaaggtgaaagagaatagtaaaaagaaatattgacatctatgacatattgtaattaaattaaattagtatgtctatttatatagaagaaacgagggaatagaatgatgcagaatcataatcaacagaaaaaaattgcgctgatcaatgactttacaggctttggcagatgctcaattgcggtacagatgccgattatttcaatgctgaaagtgcagtgttgtgcagtgcctacctcgattttttcaaatcataccgcatatgaagattattattttacagattatacatcaaatatggaagcatatattgaacaatggaagaagctggatctgaagttcgaaggaatttgtactggttttttgggatcagcagaacagattcggattgtcagtgagtttatccagtattttagagacgagaatacagtggctgtgatcgatccggtgatgggggacaatggggaggcatattcgacttatacggaagaaatgtgcagacagatgattcaattagtccgctatgcggatgtagttgttccaaatgtgacagaggcatgtatcctgacaggaacaccgtataaggaacggtggacaacaagagagctggcaaagatggcagaacagattgtgcagaccggaccagaaaaagttgtgattacaggaattccacagaaaacgtatgtatccaacttgtgctatgaaaaaggcaaaggatacgagatgatccgtacacataaagtaggacattccagatgtggtacgggagatattttctctgcaatcattgcagcagatgcggtcaatggagtggaatttacaaaatctgtccgaaaggcatccgcatttataaagaagtgcatacaaaagtcaattgaaatggagattccgttgacggatggtgtctgttttgaagaattaatgggactattgaaataaaagaaaattaaggagtaaacaaaaatgaatttagaagaatgctatgaagcaatagatagtgactatgatgatgtgatgagaagacttggaagtgaaacactggtccgtaaatttgtattgaagtttttggatgatacaagtttccggggattaaaagaaggacttgaaaatcaggatgcagaactcgcattccgaagtgcacatacattgaaaggcgtgtgcatgaatcttggatttacaaagttattcgaggtcagctcagcattaacagaagagcttcgagacaaagaaatcaaagaaaacactacagagatgtttgaagaagtagaacgagaatatacccgaacaatagaagcaattaaaggattatgttaagaagacaggagcatttatcaatcaactacttacacgtggtgtattgaatgatgatctaaaaccattttggggagctatggagattggaatgggaactgctccccgttaagtagacaattgaaaaaatataaatttttcctgccagtagaaatttatctgctggcagtttttatagttgcaccacttgcagcgtatactccttcagcaaggcctgtatcaacggaaacaacaggtcttttatatgttttcatgataaattccttcaatgctttcgtgtattacatactatctaaccacattaatggaaaaaatgtatagaaatcaagaaaaatccttataaagtgaatgacaattcatccaagcagggtgtagaatagtaaaataatggctgaatagtgattggaaaaggagagaaggcatgcttcagatacaacatatttgcaaggaatatcgaacaggtaatctgatacagaaagcattggatgatgtcagtctgaatctcagagataatgaatttgttgctattctgggaccgagtggttcgggaaagacaacgcttctgaatatcattggcggtctggatcggtatgacagcggagacctgatcatcaatggaatatcaacgaagaaatataaggacagagattgggattcttatcgtaatcatacgattggatttgttttccagagttataatctgattccgcatcagactgttctggcaaatgttgaactggcacttacgatttcggggattggcaagtccgagagaaggaaacgtgcgacagaagcacttgaaaaggttggtctgggtgcgcagcttcacaagcgcccgagtcagatgtccgggggacagatgcaacgtgttgcgattgcccgggcattagtgaatgatccggatatcctgcttgcagatgaaccgacaggtgcactggacagtgatacaagtgtgcaggtcatggatcttcttcaggaagtagcgaaagaccgtctggttgttatggttacacataatccggagcttgcggagcagtatgcgacaagaatcgttacattaaaagatggtgtgatccgttcagatacagatccgtttgaagtagatgaagcaacgataggagtggcagaacacaggaatatggggaaatcctcgatgtcatttctgacagcattagctttgagctttaacaatctgaagacaaagaaggcacgaacgcttctgacttcatttgcaggttcaatcggaattatcggaattgcattaattctgtctctatctacaggtgtgaatcaatatattcagaatgtagaggaagagacgctttcagaatatccgctgcagatacaaagtacaggctttgatttgacatccatgatgatcgggatggacagtgcttctgcggacgataaaaaaacagacaaagagaagtcagatacaaagaaaaagtcaaaggatcaggttaaagtaattcagatggtgacgaatatgttttccacaatggattcaaacgaccttggtgctttgaagaagtatcttgatactggcaagagtggagtgaaacgatatacgaatgctatagaatataagtacagcgtttctccgcagatttataaagaaaataaagacagtatccgtcaggtgaatccagatcaatccttttctgctatgggattgggttcttctataagtacgaatagtatgatgtcatctatgatgagtacagatgttttttatgagatgccggagagtagtaaactctatgaaaatcagtatgaagtggaaaagggtcattggccagagagatataatgaatgtgttgtggttctgacttcgaatggcggaatgagtgattttatgctttatacattgggacttcgtgatccgctggagcttgatgagatgatccagtcatttatgaaagaggaaaatgttactacaccggatgatctgggaacctattcttatgatgatattatcggaacaaagttcaagcttgtgaacagttctgattattatgagtatgacagtcagtatcaggtctggaaagataagacggataatgaagattatatgaaatcacttgtagcgaatggggaagatcttaccgtggttggtattgtcaaacccgctgaagatgcgaaagcctcctctctgagtccgggaattgcatatccgacatcattgacgaaacatgtggcagaacaggcagcaaaaagtgagattgtgaaacaacagctgacaaatccggatgttaatgtatttacaaataaaaaattcggagagaaagacagtgaaaatggattcgccatggattctttatttacggttgacgaagcagcactgcagaaagcatttggatttgacgcaagtgcgatgaacaatttaggaaattctctggatttcgggaattcgttaaatctcagtgagtctatggatctgtcaagagcatttcagacaggaagtaatacgctggatctgtcgggacttgtgaatccagattctctgaacttagatctttccggaatgccgcagatgaatctgggagagatcgtttcgaatctggatctgaaggtatcaccggatggtatgaaacagatggcttgtggactgctgacgggatatcaggagtatgcaaagacacatccagaggcagattattcaggtcttggagaggattttacagcatttcttaagacagatgcagcaaaaaagattatttctgataatataaaagatattataaaatcaagcggaactgtgacgattacaactgagaaaatacaggaattgatcaaaaatattatggccggatacgaacagtatattacggaaaaaggatatacagatccggatcaatttgatgaatatttgatggaatatcttcagacggatgaagcgaagaaaataatttcagattggatgtcagaagttatgccggaagatccggagattgagataacaccggaacagcttgagaaactatcagatgatcttgtgaaaggttatttggcatatgcttcagagaatggtcttccggatccgtctaagatgggagaatatttcatggcttatctgcaaacagatgatggaaagaagcagtttcaggaaggtctgtcagcaatgatcgatatggatcagttggagagccaggtgtcaaaaatcatcggaaactatatgaatcaggcaatgggggcaatgggaaatacgattggtcagacacttgagacacaggtgtccactgcaatgacacagattatcggtcagatgacaacagggcttgaatctgcaatgaagcagatgatgaccaacgtaggaacgcagcttcagaacagcctcggaaatgcaatgcagattgatccgacagcatttgcagatgcatttcagatgaatatgacggaagatgatttggcagagcttatgatgtcgatgagtgggaaaggcttggcttcttatgatagtaatctgcagaaactgggatatgtagattttgcagtcccgtctgctattaacatttatccaaaggattttgaaggaaaggaacaagtagtaaagattctggacgattataatagcaggatggaggcagaagggaaggatgagcaggtcattacttataccgatgtagttggaactttaatgtcctctgtcacaacaatcgtagatacgataagttatgtgctgattgcatttgtagcaatttctcttgtggtatcttccattatgattggtgttattacctatatcagtgtgcttgagcggaagaaggaaattggaatattaagagcaatcggtgcgtcaaagcgaaatgtatcacaggtatttaatgcagagacatttattatcggactttgtgcaggattgatcggaatcggactgactttattacttctgattccgggaaatgcgattattcacagtgtggcggataatgcgaaggtaaatgcagttctgccgattgttccggcaatcatactgattttattaagtgttgtccttacattacttggtggactgatcccatcaaagaaagcagcaaagagtgatcctgtgacagcgcttcgtacagagtaggggactggtgagaagaatggaaaatttagtttttagtctgaatgcaaccgtaccgatctttttgatgatggtactgggaatgctgttcagaaagcttggctggatggatgaagagtttgcagcaaagatgaataaatttgtctttttgattccattgccggtattgttgtttggtgacctggcaaaggttgattttaaagaagtgtggaatatcaaatttgtgattttctgctttgtagtaacatttatctgtattacaattgctgcactggtatcttgcatctggaaagaccgttcaatccagggggaatttatacaggcttcttaccggagcagcgcagcacttcttggaattgcatttatccagaatatttatggaaatgcagggatggcgccacttatgatcattggaagtgtaccactttataatgtaatggcagttatcgtgttgtccttttttcatccggaacgaaaggcaattgataaagctgtatggatgaaaacgttaaagggaatcgtaaccaatccaatcatcattggaatcgtggctggtctgatctggtcagcctgcaagatcccaatgccggtaattcttaataaaacggtgacaagtattggaggaatgtccacaccaatggggctgatggcaatgggagctacctttgattttaggaaagcacttggaaagatcaaaccggctgtgacagcaacaattatgaagttggttgtatttgtggcaatttttcttccgattgctgtgaaactgggattccgtcaggaagaactgattgcaatccttgtaatgcttggatctgcaacaacagtaagcagttttgttatggcaaagaatatgggacatgaaggagttttatcatcaagtgtagtgatgctgacaacattgttcagtgcattcacgttgacaggatggctgtatgtgctgaaagcgtttcagctggtataggaataggaaattcacatcttgttgcgtaggaggataaaaatggctgttggtcgcacatagtacgaacaataacaaaaaatgttgaaaaatgggggtgttgtgggaaaaagttcttgcaacgtcccttgttttatgctatactacgaacgttgctaaaaaacacgtatgtggattccttccaaggtgcctaagtcgagacaggagtttcgtccggttgcgaaggagagtaaaacatacggaagaaaaaaaccaaatggaggagaataacatgagcgttatttcaatgaagcagttattggaagcaggtgttcattttggacatcagacaagaagatggaaccctaagatggctccatacatctacacagagagaaatggtatctacatcatcgacctgcagaaatctgtaggaatggttgacgatgcatataaggctgtttctgacatcgctgcagaaggcggtacagttcttttcgtaggaacaaagaaacaggcacaggatgcaatcaaagctgaggctgagcgttgcggaatgtattatgtaaacgagagatggcttggaggaatgcttacaaacttcaagacaatccagagccgtatcaaacgtctgaaagacatcgagagaatggcagaagatggaacattcgaagtacttccgaagaaagaagttatcgaaatcaaaaaagagtggacaaagcttgagaagaaccttggcggaatcaaagacatgaagaaactgccagacgctatcttcatcgtagatcctaagaaagaaagaatctgtgtacaggaagcacacacactcggaattccgctgatcggtatctgtgatacaaactgtgatccagaagagctggattacgtaatcccaggtaatgatgatgcaatcagagctgtaaaactgatcgtttctaagatggcagacgctgttatcgaagcaaaccagggtgcagctgaggatgagtattacgaggaggctgcagaagcagctgaagctgaagaggctgtagaagagtaatatcagttcttgatatgaaagaaaatgcttcagcctgattatcaggttgaagcattttactttatagaaatagttctatagagaaaagcatatgttactgcttacagtgacatacacattatgaataatggaggaaaattatcatggcaatcacagcaggaatggtaaaagagttaagagaaatgacaggcgctggaatgatggactgtaaaaaagcgctttctgagacaaacggagatatggacgcagctgtagagttccttagaaagaacggacaggctaaagctgagaaaaaagctggaagaatcgctgcagaaggtatcgttaagacagttgttaaagatgacaaagttgctgcaatcgtagaagtaaactctgagacagacttcgttgcaaagaacgacgagttccagggattcgtagaagcagttgctaaccaggtagtagattcagaagcagctgatcttgatgcatttatggcagaggcttgggaagctgatacaacaaagactgtaaaagatgctctcgtagagaagatcgcagttatcggagagaacctgaacatcagaagattcgagaaagttgcagcagacaacggtgtggttgttccttacatccacggtggcggacgtatcggtgttcttgttgttgctgatacagatgttgttaacgacgagatcaaagtagcactgaagaacgtagctatgcaggtagcagctatgtctccgaagtatgtatcccgtgaggaagtatctcaggattaccttgatcacgagaaagaaatccttcttgctcaggctaagaaagagaacccggagaaaccggaaaacatcatcgagaagatgatcatcggacgtctgaacaaagagctcaaagagatctgtctgcttgatcaggtatacgttcaggacagcgaccttacagtaggaaaatacgttgataaggtagcaaaagagaacggtgcaaacgttaaagttacaaaattcgttcgtttcgagactggcgaaggaatcgaaaagaaagttgacgacttcgcagcagaagttgcagctcaggctggaatgtaagcgtctagcacaagcacggcgtatataaaaagaaatcctcgacacaagtttacttgtgatcgaggatttctttttatatgcatcgtgcgacgtacgtatagcgagatgaagcgaagcggatagtatatgaaaaaatcagttggatgaagagggggtgtgattttcattgcctgctttttgataataattgaaaaatatagtgtatgaacataaaatacttgttataatctaaatataaatatgacagaaaggttggtagtgattatgtgtgagaaaaaggaattgagtttttcaatattcatgctgtatagccttgcggataagtggaagatgtctccagctaaagtgtataaaatattaaattcaaccggaattttggataactatattattaaatgttacgatgttcttcatacacagggaaaagaatatttggtagaagatattaccgattatgtgagagaaaaaggagttaatgtatgattgaaaaatccaaaggtagtacattctatttatagatattgaaaagtattatatagttttataaattacaatagaaaagagtgaaaagatgaaaagtgttcttattacaccagaaggcatacaaaaaaatttgaaaaatataaagccgttagatgctatttgtgaatatatttggaatggatttgatgcatttgcaacacaagtagaagttgagttaaatcgaaataaaatgggactcatcaatatgattacaatacgtgataatggatgtggaattaattatgatgaattgaaatataaatttcaaccatttaatgattctaaaaaagcaaatgcgtctcagaaaacaaatcatacgttacctcatgggagaaaagggattggtcgtctgacattttttgcattttctcagacggcaaggtgggatactgtatatcgaaaagatggggatacatatgagtattacatctctatgaataaagattctctaaatcaatatgatgataatggtgaaaaacttccgtgtaaagtagaaaaattgacgggaacaaaggtaagttttacacaattagaatccatggaaaaagaagatattatcaataaaatcaaagaagaatttttttggtttttggaattgaataaagaaaatgactataaaattatcgttgataaagaatgcataaattattcagattttgttgagcatactgaaaatatggatgtttctaaatatgggtgtaaggagacgtatgacgttcgttttgttcaatggaagcaaaaattggggaatgaatattcgcgaatatattatcttggttcagataataaagaaagatataaagaaactacaaaattgaacaaaagggcagaccatttttttcatagcgtgtatataaaaagtagttattttgatgattttcattttacaaatgaggagatagaaggtcaaggggacttatttcctaataagtgtgatgatgaatacaaaattttaataaatggaattaatacatttcttattaaatatagaagtaggtatttgaaagaagcttcagatgcttatatttcaaaactgatagatgataaattgtatccggaatttgatacgacgaattttatacaggcgtatcaaaagaaagaactagatagtcttgtaggtgctttatatgctgcacagcctaaaattttcacaggcttaagtaatgataataaaaaaatcacattacaattattaaggcttattatggataatggaaacaaaccagagttgtttaaaatattacaaggtgtaattgaactggatgaagaggaacggaaggaattatctagtatacttgaatacagttcattaagtaatataacaaaaacaataaaattattatgtgataggcagaaagttattcaggcattaaaagaaattgtgtttaataaagagtttaattcatatgaagtaacacatgtacaagaattagtagaaaatcattattggatttttggagaacaatacaatttaattacatcagctgaacctgattttgaattagcattaaagggaatgataaaagcggaaactggaatggaagaagagatacatatagagcatcctgataaaaataaagaaatggatatatatatgttacgtcaagatcgtcagggtaaagtaacagaaaatgttgttgttgaattaaaaagacctaaaataaaattaggagaaaaagaattatcacaagtaaaaaaatatatgcgagtaataaaagacactccaagatttaatgcaggtaatgttaaatggatgttttatttggttggaaatgaatttgataaaagtcattatattttgggagaattagaaagtcataagcatttaggagagcaacatttagttcattgtcaggatgacggtttgactaaaatatatgtactgaaatggagcgaaatttttgatgattattctaagcgacatgactttttgatggaacatttaaaattagaggaaaaactatggttagaaactcatgaatctgcagatgaggctgtaacagatgttaaaaataatagtgcaacattatcagaggccgttattcctaaaaatcaaaaaattgtctgctaatagtacatagccgattggttcaccaagagccaatcggttttttcatgcttatttttatacatagccagtctcgtaaaacggattggctattaaatttttcgaggaaggaggtaacaatatgaccaagtgtaaagttatcgctcttgcaaatcagaagggaggaaccgctaagaccacaacgacattaaatcttggaattggtcttgcacatcaggggcggaaagtattattggttgatgctgatccacagggagacttaacaatcgcattagggtggactgatgcagataatcttcctattacgttggatacacagatgaagaaagtattacaagacgaaccatttgtgtataatgagggaattttatatcacaaagaaggagtagacattattccaactaacattgaattatcgggcatggaaatctcactggtaaatgccatgagtagagagcagactttaaagctgtatctggcagatttgaaaaaggattatgattatatcctgattgattgtatcctgaatatgaaaaataatggatagataatcaatatgaatctggtcagtgttggaacaatcaatgcatctttggtaattcccagagaagtttttaagagcagtattctggcaaatgcttctgcaatcattggacttcataatcatcccagtggcaatgtgaaaccgtcaaaagaggatatgattgttacgagaaagctgcagaagtgcggacagctactggggatagaattgttggatcatatcattgtcggtggaactaatggaaagatgctcagcttccgagaagaaaagatgttgaatgtgacaggaaggatggattgggagagatagaagaaaaaagaattagaagtttttatttattgtaatatttcatgtagcggcattagtaaaatagtgtcgctacaaaaaactgacttatacattgatattatatgcataactcaaaataaaattgttaaaaatagaaaaagaaacaatatataacgaaaaaatctctaaataagaaaatttacattgactgagagaagagtaaaacatataataaaagtggaggtgtataagaatgttagtaaaagtaagtgttgaaaattttaaatcttttgataaagcagcagagctgacaatgatttcctcaaataaaatacgaacaaatgcaaatcacaggttaaagataaaaagtacccagttattaaaatatgcagtagtttatggagcaaatgcatctggaaagaccaatctggcattgttctttaaattttttaaagacagtgtctgcaatggtattccgatagaagctacacagatgttttgtaagaatcggcaggagaataaggaacgagaaagtagttttgaaattcagattactgtaggtgacaaattttatgcctatggtttttccgcagttttaagcagacgaaaagtaaccggagaatggttatatgaattatatcagaatggttcagcaaaatgtctctttgaacgagaaggaagtaaacgtccggtgttaaatgatggtattacgctgacaaacacagaaaaaaataaatttgaaacctatgcagatgattttgaaggaaatgaaacatctttgttcctgacagaaatgaatcgtggaaaaaaatatagcacacgatctaaattattgtttttccgggatgtatatgattggattcagaatcatatttcgatcatcacaccggatacaccattgattgatttggaatattattatgatgataattcgctgaagctgattaacaaattgatcaaaacatttgatacgggtatcagccaggtgaaaattgaagaaattacattggatgagttatcaaatgcattgccgaaatcagtatttgataagatgatgcagcatgtaaaaaatagaatggaagagcaggaagaaccatcattcagaatgacgatgaggtcgaaggaaactttctttaatatcgaagttgaaggacattctgaaccgaaggtcacaacaatccggttacatcataataagtcattttatgagttcggttttgatgaagagtctgatggaacaagaagattattcgatttgatggatatgctgttgaataaacgagaagatgttctttatgttgtggatgaattggagagaagcttacatccgaagctgacagaacgatttttgcaattgtttatgcagctacatgatgagcagcgtatgcaactattgttcactacacatgaatcatccattatggatcaggctatttttagaagggatgaaatctggtttatagaacgtaacgcagaaaatgcaagctctatttattccttagatcgtttcaaggagagatacgataaagttttgagcaaggcatatctggaaggaagatatggtgcgataccggtattttcaacattcgattttgcgcgagcaacgagtcagaaggatgtgcttgcacagacacctgacgactgctgtgacagtgcagaaagtatttctgcaccgagagaggaggagtagccttggctccagtaagaagttatacgaattggaatagcagaactacagatgaagaagaacagattgagccttatcgtaagtactttttcatatgtgaaggtgctaatacagaaacatggtatttcaaaaagttaattgatatacgaaaagaattaaatattcatccgttgattgatatccgtttgcttgaaaaaacagagggagacagagatatttcatttccaagacgtttgattgaatttgcggaagaccagaaagaaaatccggaaatatcatttgataaagaacgagataagatgatcattgtttttgatggagatatttttgaagagaaggtgcttgattatgatgaattagtagcagaaggtgaaaagaacaatatattagcggttagcaatccggcatttgaattgttcttgctgttacattatgaaaattcatatgaagatgatattgagccgaatgctgaacagattatccagaatgaaaaagatggacatcagacatttatctataagttgttacttgccagaacaggaatcaatccgaagaagaattctgcaattggagagttggcagagaaagtagagattgctattgagcaggaaaagaaaatcaatgaagatattcatcagtgtaaaggacagattacttgtaatataggtcggataattgatgaaattcggaaagatgatggaaaatagacatatgaaaaaaataagaaaggtaataaaatttttgagtaaaaaactgaatatacttcaggaaaaagttaatatgttgtatgttgcaataagcattcttgtagtagtagctataggagcattaattggatcttgttggatgcccgaaagttacaatgatgtaaaaaatatagttgtagggttgtctacaggaattattacttcggcattagttacagtatatatagaaaatataaatgcaagaatggataagaagcgaaaagtacgatataaacaaatgttattaaatccattgtatatgtctatagacagattatataagcgtttaatattgaatattaatgaatatcgagttagagaagaatatgtgggatattattttttgccgattaaggaaacaaaagaaatatctgaattttttgattcgttacgaaatattgattttgagaaaatagaagatgagaagaaggataacaatttcaagaatttgatggatattccgatgatttattataatgaaatactaagccaatataaaggtattccatttgaaagtttggttttggataatattatatcgcaagaagaatatgaggcaatgaaacattttgatatagtaaatgaatgcgccagactttttgagttggttagtagaggacaaatggaaagacaagatgaatatcgcacaaaaattcaactaatgcatggaatgacgatatttataaatcgaatgatgaggatatttgatcagattgttaaaagcgcaaaaatagataatgaaaggataaagaattatttagatgacatctggtatcatgaagtatatgtaaattctgaagagtatgtagaacgttgtatgaaggaaatggaaagtagagcgcaatattatgatgaacatccagaattgattgatgtatatgaagaagatggggaagaggatcagctgtacaaaaaaattaatacagcgatttggagttgcgatgtcgagacaatcaagaagtgttttccagaaatagataaaaataataaaggaatacaatctatgttgacatggaaattagcaaaagatgttatgaaagacaagcaattgcgaagaatgtattatgaaaaatatggagaaaagtataaggtgaaaaaagaaaagagatggtgggaaagaggataaataatctatgaatacatagccagttggttctacccccaaggaatcacctggctattttcatgcccgggattatcccgaataatatcaatccaaggtaggaaaggagatgaaaattatgccatatataccaccatcagtcgtgcaggaggtcaagcggatggacttattcacatacttgaaaaattatgaaccatacgaattggttcacttttctggtaatacctacactaccagaacacacgatggtttgaaaatatcaaatgggaaatggatgtggtggagtcagagaaccggtggcagatcagcactggattatctggttaaagtaaaaggatacagttttttagaggcggttgaattgcttgcagaacgggcaaatattcaaccgcctctttctgtatctaagagtgttctgatggagaaacagctactgttgccaaagaaaaatcaagataatcaaaaagtgattgcgtatctttcaggacgtgggattgataaagaaatcattcagttttgcttagagtctggaagagtttatgaaagtgaatttcatcacaatacggtgtttgtagggatggatgagaaaggaaatccgaaatatgcagctattaggggaatcggaaccagttttatcggagaagcaaatggaagtgataagaactattctttttccattttcacagagaaatccaatgatacggtgcatctgtttgagtcagtcattgatttgttatcttagcattagaattggtgggaaaacaaatttcaaaatggataggtaacggaagaacaaaagctaattattattgccctaaagaaatttcgtcagttttttattggagagtcttttggatgaatgtattaaacaaaattttaaaagaaaacataatattttacttgacttttaaatattacaggtgtaagattttgaaaaataaaataattagaagaaaggggtatctatgaaaagaagacgaaaaaagcaaaatatccaaaaatctcacatttgtaagatttttgggttgatagtagctataacagtaattgctgtttcaggaggtgttttattaaaaaggacgataacagaatcaccagaagacacacttatggaatatatgaaccatattgaaaaaaaggaatatgaagtaatgtatactatgatagattcagatgaaaaagtttatctgacaaaagaagaatacatacaacgaaattctaagatatacgaaggaatagaggtcagtgacattaaaatcagtcatatagctgtgaaagagaaaaaagcagatacagttacgctttcgtatgaaacatcatgtaatacaattgccggaacaatacaatttgacaatatggcggaactgaagaagacgaaacagggatataaattagtatggcaggatagcctgatttttccagatttagagagtgatgataaaataagtgttactacatcaaaagcggagagaggagaaatattagaccgagatggtaaaatgcttgcaggaaaaggagtagcaacatcagttggcattataccgggaaagctggaagacaggaatgtatctattgaaaaaatagcggagttattagagatagatgtagaaacaataaataacaaactcacagcaaagtgggtaaaagaagattcttttgtaccaattgaaactattccgaaagtagaagaaatagatttaatgaaaatacagccagaagaaaagacacttgaggagcaggattgtcagaataaacttttggaaattccaggggttatgctatcagatgtggaagttagaacctatgagttaggggaagcagcagctcatttaattggttatgtacagtctataacagcagaagatttggaaaatcatccaggggaaggatattcagttgaaagtgtgatcggaagatctggggtggaaaagttatacgaaaagcaattaaaaggaaaagatggttgtgatataaagattttggatagtgatggggaagtaaaagaggttcttgcaagtatttttaaagaagatggtatggatataaaattaacgatagattccgatttgcaaaaatcattatacgagcagtttaaagaagatccggggtgttctgtcgcaatgaatccttatacgggagaagtattggctttggtaagtaccccatcttatgataataatgaatttatacggggcttatcatcagagaaatggacatcattaaacgaagatgaaaagaagccattatataatcgttttcgtcaagtatggtgtcctggctcaacatttaaaccagttgtggcaggaattgggttaaaaacggaaagcatagatccaaaagaagattttggaaaagaaggtttggcatggcagaaagattcgtcttggggatcttatcaagtgacaacacttcatgaatatgaaccggttattatgaaaaatgcaattatctattctgataatatttattttgcaaaggcagctcttaaaattggtagtgagaattttatgaatactttaaatgaaataggatttaatcagaatatgccgtttgagattgcgatgcaggaatcaacatattccaatacagataaaatagaaacagaaatacaattggcagatagtggttatgggcaaggtcagattcttgtaaatccattacatctggcaagtatttatacttcatttttaaatgaagggaatatgataaaaccgtatttgaaatacaaagaagaagcatccggtgaaacatggatagaaaatgcgtttagcaaagaaaatgtagaagaaattatgcaaggggtggaaggtgttgtaaatgatccggaaggaactggatatgctgcacatcgtgacgatattttgctggctggaaaaacagggacagccgagttgaaggcaacgaaagaagatacttctggcaaagaaatcgggtggttttcggtgtttacggcagataaaagcgtggacaaaccaattcttcttatcagtatggttgagaatgtgaaaggaatcggtggaagtggttatgttgttaaaaaagatgcaacagtattggatgagtattttgaagaataaaaaaatttttatgagaaattattacatatgtaagatatttgcgatgatattgatagttcttattgtttttacagggtgcggacaaaatcgaattacggaaaaagaagaaaagaaagaaaccgtagaatctgaaatgaatgcagaagtaaaaaaaaacagtgcaaacttttcggtctgtttatatgaaggagaagtcggagttaaatacattaaaggtgaaaagaaaaattatcaattgtctggaagaaaaaggatatgcggcggtagattgtgataatcagatcgatatggtcaatcgtgaaaaagtagaagaattttgcaaagcagcggagaaagaagaacaggcaacagtagatattgtacaaccgaacagagattcgctacaatattaatatttctggtgataaggagatgggaagatgagacaatgtatggatgcagataatctgcaccgaagactgaagaaaataatcggacaggttcaggcaatcagatgtactggtatcactggcattaattgcatcagtctgtattggtgaaaattttgcagcaggcgaggtctttctggttcaatattccattaaagcggcttaagaaggttatggttgtaatggcagccgccaggatatcactgactggttctgcaaggaaaactgcaaataccttatcagataaaaagagcggcaggataaagatcagagggatcagcaggatcagttttcgcaggcatgcaagaagcagactgatctttgcctgtccgagtgccataaaactctgctggcagcttatactcccggaaagcaggagacagcaagagaagatttcaataacagcagaaattatgtataattatgttgtaggtacaaaaatagtgtgacagcgaggtagagaaaatggaagagcagataaaaaagatttatgaaaagcagaaaaatggacgcatcaggatgatacggaatgtgctgttgatttatgcagcattgatctgtgtggtgagtattttcaaaggaaatccgttcccgcatcaggagacagtactctttttcgatgtgaagcagccgggctgggtcacgacagatccctggcttctgtggatttgcgtggtggttgatctgattgcaggtatattcattttaatcagggacattctcagagatttttcaaaaattgaccggattctgtcacagcaatgtgatgcagaaaaatattcagaaatgctggaagagttgataaagtacggaaagagcttggattatcatggatttcaaaaaagtgtcatgctgatagctgagtctaaatatgtagttgcactgatcataaatgggcagttgcagaaggcagaagagtatataaagaatgaatgggaaggaaaaagagagggacgttcctggcagcaggtcatgacgaatctcgaactgtcgaagaaatatcaggagaaagatgcggcaggttattcggctacattagaaaaagcagggaaagtatttcaaaagaatccactgtttatggcaaaaaatttgatgctgaaaggtgaagatgaggcagcagtaagattactggaaaatgatacggaaaagttgccttattatgaggttacacgcagattcctgctgggagtatgttactaccgaatcggaaaagaagagcagggaaaagaatgtatggaatatgtaattgggcatggaaatacgttgaagtgcaaagaagaagcggaaaaatatgtaacagtgtaagtaaggatgttctttaaaatgacagggtaacaaaaatggagaagatatagaggatggtaataaaataggatatatcgcacataaagatggtgaatctggagtatacaattcctgaaaatagacttgatttttaaatattacaagcgtaagatttaaggaacaaaaaaattagaagaaaggaatcggtggaagtggttatgttgttaaaaaagatgcaacaatattggatgagtattttgaagaataaaaaaatttttatgtggaattattacatatgtaagatatttgcgatgatattgatagttcttattgtttttacagggtgcggacaaaatcgaattacggaaaaagaagaaaagaaagaaaccgtagaatctgaaatgaatgcagaagtaaaaaaaacagcgcaaacttttcggtctgtttatatgaaggagaagtcggagttaaatacattaaaggtgaaaagaaaaattatcaattgtctggaaaaaaaaggatatgcggcagtagattgtgataatcagattgatatggtcaatcgtgaaaaagtagaagaattttgcaaagcagcggagaaagaagaacaggcagcagttgatattgttgttgtatttgatgaaggggaaattatacaatatcatttagagtcaatgaatggaaagataaatgttcgattatgtcaggttaaatggaaggataatagtccacaggctaattattatgatgaatatgaagcatatgagtggaaatatacagaaaaaggatacttgtttctggaggaatatcacccaccgggatttgatggagcaccgggtgaaactggattcagagtgcagccattagataaaacatgccgggaattgaatcgaaaatatgttatgccgttggggtatgcacttaataatctgttgattacaaattgggataaccagaattatacggaacttgatttttatgatctttatgaaaaaatgtattatatgaaatatggaaagcaagttccatatgaagcaaattatggtggagcagaatatgaagttccagaagatgagtttgaagaggttataaagacctatttaccatttagtaataccgagattgaaaaggaaactttttataactctaataataaaacttttagatacagaccgcgagggttatatgattgtgaattcccatatgagccatatccggaagttatctcatatgaaaaattacaagatggaacattaaaacttacgatagaagcagtatgggaaatcagaatgttagatcaggcaatcaccagtgaattgatgataaaacctatggaagacggaagtttccagtatttatcaaataaggtaattagttcagatcaaaatgcaaatgcagggtggtatatgccaaggttaacagaagaagagtgggaagagaattacagtaataattagggggcaatatgaaaagaaaaagtattttgttagtactttgtataggaatgattctgacttcctgtgaaagtaagatatcgttaaacagcacagatgtaaaaaatgagaagaatcagaaaaacactaccatggaaaatccggataagggatataatctaccaatcgatgaagacaagaaaaaggaagttgtgaacgattgtgaaaaaattatgggcattgtccgagacatttattctgaatataatggaatacaagaagcagatcagaacactgctgagcaaatgatgaatcggatgaaagaaattatcaaacaaaatgggaatccggtcattggttccgatcattattctgttatggataattatcagaagatggaacaatttttaaaatctgcagaacaagaagaaaaaggaagtgtaattttatatgaagcagatacagatggtggaattaccagaaaagaatatagttatgatggaaaagaaatgagtgtgatgtccgcaaaaatgatctggagtgaggatacagagcctgtacttacatacatatcgctatcaaaaataaaagaatgggcatatacagaaaatgggaatttctgttatgaattatgcgtacctgaaccaccggaagtgacagagattgtagatggaagttgtattatccgggtaaagcctttgagtgaggagtgtcgggaatattcaaaaaaatatgtgagtacgttcggctatcagggaaacaatctgttatgttcaaactggaatgcggaggatatgcaggggttggattataatggactttatgaatatttttatcaaatgaaatatggagaaaaatttactgcagaaaaagaggttgtgggaattccagcagaagagttcgaaaatgtaattatgacatatcttcctgttacaaaagaagaattgaaagaatgggcggtctacgatgaacaaagtaatatgtttatctgggaacgattgggatgtggtaattattcaccaacacattttggcttgtctttaccggaagtaacagaagtcaggcacaatgaagatggaaccattgttttgacaattcatgcagtatgtgattctgttgtatgtaatgatgttgttattacacacgaacttacgatgaaaattcaggatgatggaacgattcagtatgttggaaacaggattttagataatggtattgataatataccgaggtatcagtaccggttaggtaatttgcagaattgatcagtagagaagaatgaaataaagagaactgataacgggaaattatgctatcagttctctttatttatttccaaataccaagattagaaagtacagattctgttatttcggtagcctgacttccagttgcaccagaagaggattgaatatttgttgcgaagtagtaagtattattcgctgtttcaatgtatccgataaaccaaccattgacatctttaccattgacacgcccggttcctgttttcccgtaaagagaaccggaagaagtagtggaaagcagcagagctttttttattgcctggatatttttactgtcaaaatgaaaattattttgatagaaattctgtaacaattccacctgttctataggtgatatcttcagagagaaatctgtccaatagagatttagatttgttccagtattctgattcccatagtttattgtctgtaaaaatgttcttacggcttcaaaacctgcctgtgaatcaattgcctgaaaataccagtttacggaattatgtatagccgaggttaaatcttgatcggcttcccaggaattaaaaggatatggctctccattccatgtgaaagtggaatgttctggtgtaataattccagattccaagccaagtaatgcatcatatattttataagtcgaattcggtgatacacgtgtggaagcatgatccatattataaatattccatttatcagcagactgatcatataaaacaaaacttccggtgtagtccccaaaatcggaagaaagatttagctgagtaatattcttttcggttgtgtcaaaatgatagccagtctgatcagaagcataaacagaaagtatgggaatgcatccaatgatgatagtagagacgaatatgcatataagatatccacgaattttttgtttaaaagtaggttggtggaatgatgcaatatttaaaatgcgtccttttaactgttttatatttccactgattcccatagtaaaagggaatggagacagagctattgtttcggcaaagttaatcagtgtatttccatatgacttgtattctgtttctttcaataattgtaatacagcactgtcgcaggcaagttcccgttcctgacgtattttttttagaaaataccagattaggggattgaaccagtagaaaacatttactgtatttatcaaatatccaattagaatatctttatgcttgtagtgctgcagttcatgaagaagcatatatcgaatatcagttgcgcttatagttccagcgttaaaatctgaaatcaagtgaattggaagataaatgcgaggatgcaggaaaccagccaaaacaggagatttcaaaaatgctgtactataaatcggaatggtatgcttgctgttcacttcgtttaaacattctatataaagagcgttgagttcttcattttgaagaggtaaagcagaactatgtaaggcttttacttgttttactgagcggtagagaagaaaaaacattatgaatataccgatactccagaaaaatacaagtaatgtgtgaataaaagttggtatttgggtgctgacagagacagcaaaatcatttattttatccaaattgtaaccattaccagaaagaaaagtggtttgaatgtcaccattggtacttgaactggctgtcagcaaatgtctccacgatatagaagatggggcagagtttatcggtaaaaagggaacaattagaacggcaagaaatataatcgaaagattatattgcatacgtgcggataattgcctttgcaataaattttttaatcccagtaaactacctaaaaaaatacaaatgatggcattacagagtaaaaatcgaaaactaaaatatatcaaaatatgctcctcccatggttaatgattggaaagaagatcccgtaagctggcaatgtcttcttcagacaatttatcatcctcaatgtaagaggcaagcatagaagtgatattaccattataatatcgctttaaaaaagaattactttcctgccgaatatattcgtcttccttgaccaatggagtatagacaaaaacccggctttgtttttcataggttagtgcttttttagaaacgagacgtttaatcaatgtctgaattgttttaggactccaactggaaatttgtgttaatttttcagtaatttcattggtgctgattggtgcgtatttccaaacgattttcataacttcaaattcagcttctgaaatttgaggcagattgctcatgtgatattcctccaaatcttacaaatgtaataaaaatattatatatcttaaaagtttattctgtcaacgaaataaaaaatttgactttaaattcagatacattttaaaggtatgtagaatcgagctaagatgtaaaagtacagaacaaacattcgatttagttctgtactttttttctcctgaatgatatactatacaagtaacaatactaagaaaacaactactatttctaaaatatcaccgctaaattagagcgctcaggagaaattacatggatcattttgaattagtatcacaatacaacccaactggcgaccagccgcaggcaattaaagagctggtcgaaggcttcaaagaaggaaaccagtgtcagacgttgcttggcgttactggatctggtaagacatttaccatggcgaatgtcattcaacagatgaacaagccgacattgattattgcacataataaaacactggctgcgcagctgtatggggaattcaaagagttctttccaaataatgcagtggaatattttgtctcctactacgactattatcagccggaagcatatgttccatcttcggacacatacattgccaaggattcatccatcaatgatgagatcgataagcttcgactttccgcaactatgtcactgatggagaggcgagatgtgattattgttgccagtgtgtcttgtatttatggactgggtaacccggtagattaccagaacatggtagtttctttgcgtcctggtatgatcaaagatcgtgatgaagtaatggcaaagctgattgagatccagtatgatcgtaatgatatggatttccaccgtggtacatttcgtgtgcgtggagatgttttggaaattattcctgcttatgagagtgacacagcgattcgtgtggaattctttggagacgagatagacaggatctcagagattgatattttgacaggagaagtgaaggacgaactgaaacatgtagcaatctttccggcatctcattatgtggttgaccgtgagaatatcaaacgtgcggtggcagatattgaagaagaattagaagaacgtgtcaaagagtttaagagaaatgacaagcttttagaggcacagcgtattgcggagcgaacgaattttgatattgagatgcttaaggagactggattttgttccggaattgagaattattccagacatttggcagggcttcgaccgggacaggctccgtatacattgatcgattatttcccggatgattttattatgatgattgatgagtcacataagacaatcccgcagattggtggaatgtatcacggagaccagtcgagaaagcagacattggtagattatggattccgcctgccatctgcgaaggataaccgaccgcttaattttgatgagtttgaaagtaagattaatcaggtgatgtttgtatctgcaacaccgggagaatatgagaaggatcatgaacttcttcgagcagaacaggtaatccgcccgacaggacttcttgatccggaagttgaagtgcgaccggtagaaggacagattgatgatctgatcggtgaagtgaacaaagagatcagtaagaagaataaagtccttgtcacaacgctgacaaagcgcatggcagaagatttgacagattatatgcgtgaagtaggaatccgtgtaaaatatcttcattcggatattgatacgcttgaacgtacggagatcatccgagatatgcgtctggatgtgtttgatgtgttggttgggatcaacctcttgagagaaggacttgatattccggaaatcactcttgttgcaatccttgatgcagataaagaaggattccttcgttcagagacttcgctgattcagacaatcggtcgtgcagcgcgtaatgcagaaggacatgtaatcatgtatgcagataagattacagaatcaatgcagctggcgatcgatgagacacagcgtcgtcgtgagattcagatgagatacaatgaagagcatggaatcacgccgaagacgattcagaagtcagtgcgtgatctgatcagtatctctaaaaaggttgcggcagaagagatgcggcttgaaaaagatccggagtccatgagccagaaagaactggagaaactgatcgcggatctgacgaaacagatgaagaaggcagcagcggaattgaactttgaggcagcggcagagcttcgtgataagcttgttgaattaaaaaagatgctcaatgatatggaataggagattacaaaatgggtaagaaaatggacgccagacagtacattaagatacgaggcgcgaatgaaaataacctgaagaatatagatgtagatatcccaagaaatgaactggttgttttgaccggacttagcggttctggaaaatcttcccttgcatttgatacaatttatgcagaaggacagagacgttatatggaatcactgtcttcctatgcaagacagtttcttggtcagatggagaaaccggatgtagaaagtatcgaagggctttcacctgcaatttccattgatcagaaatcaacgaaccacaatccacgttccacagttggaactgttacggagatttatgattattttcgattattatatgcgagagttggaattccgcattgcccgaaatgtggccgtgagattgcaaaacagtcggtagatcagatggtggatcagattatggcgcttccggagagaacgaagatacagcttttggcacctgttgtacgtggaagaaaaggaacacatgcaaagcttttcgaacgtgcaaaaaagagtggatatgttcgtgttcgtgtggatggcaatatgtatgagctttcagaagaaattacattagataagaatatcaagcataatattgagattattgtagatcgtcttgtagtaaaacctggaattgaaaaacgactgacagattctgtcgaaaatgtacttgagctcgcagaaggtctgcttgttgttgacgtgatcgatggagaatctctgaatttcagccagagcttttcatgtcctgtctgcgaaatcagtattgatgagattgaaccacgcagtttttcttttaacaatccatttggtgcttgcccggaatgttttggacttggatacaaaatggaattttcagaagaattgatgattccggatccgtcgttgtctattaatcaaggtgcgattgcagttttaggatggcagtcctgtacagacaagagcagcttcacacgtgcaattctggatgcactgtgtaaagaatatcattttgatctggacaccccttttgaggactatccgaaagaaatccatgatgttttgatttatggaacagatggaaaagaagtgaaggtttattataaaggtcagagaggcgaagggatttatccggttgcatttgaaggattgatcaagaatgtggaacgtcgttaccgtgagacaggttctcagacgatgaaagcagaatatgagacatttatgaatattacaccatgttcagcctgtaaaggacagcgcttgaagcagggggctttagctgtaacagttggagataagaatatttcagaagtgacaacactttctatagaacgtcttcagaaatttttagatgaacttcaattgacagagacacagcagttgattggtaatcagattctgaaagagatcaaagcaagaatcagttttttgatggatgtcggtctggattatctgacgcttgcgcgtgcgacaggaacactttccggtggagaagcacagaggattcgacttgcaacacagattggatcaggtctggtcggagttgcatatattctggatgagccgagtatcggacttcatcaaagagataatgataaacttcttgcgacgctgaaacatttgcgtgatcttggaaattcattgattgtagtagaacatgatgaagatacgatgctggcagcggattatatagtagatatcggtccgggggcaggagaacatggcggtcaggttgttgctgtgggaaatgcacaggaaattatgaaaaatccaaattctgtcacaggagcgtatttgagtggaaaaatcaagattccggttccgacagaaagaaagaagccgacaggttatctgaaagtagtcggtgcacaagagaataatctcaagaacattgatgtaaaattccctttgggagttatgacttgtgtaacgggagtgtctggatcggggaaaagttctcttgtgaatcagattttatataaaagacttgcaagagacttgaaccgagcaagaacaatccctggaaaacataagagaatagaagggctagagcaggttgacaaagtgattaatatcgaccagtcaccaatcggaaggacgccacggtcaaatcctgccacttatacaggcgtgtttgatttgatccgagatttgtttgcaggaacgccggatgcaaaagcacgtggatacaagaaaggacggtttagctttaatgttaaagggggacgttgcgaagcatgtgcaggagacggaatcctgaaaatcgagatgcattttcttccggatgtttatgttccatgtgaggtctgtggtggaaagcgttacaatcgtgagactctggaagtacgctataaagggaaaaatatttatgatgtattgaatatgacagtggaagaagcggtagatttcttcgaaaacgtgccaagtattcgaagaaagatggagacgttgagagatgtcggattgtcgtatattcgtttgggacagccttctacagagctttcaggtggcgaggcacagagaattaaacttgcgacagaacttagcaaacgcagtaccggaaaaacggtatatattctggatgaacctacgacaggacttcattttgcagacgtgcataaattaacagagattctccgcagactttccggggatggaaatacagtaattgtaatcgaacataatctggatgtgattaagacggcagactatattattgacattggaccagaaggaggagaccgcggaggaactgttgtggcaagtggtactccggaagaggtcgcaaagaatccagattcttatacagggaaatatattgcgtctatattggagaaataaagacgaaaaaaagtcgaaaaaagtcgtaaaatatatgcaaaaaatgcctttctattttaagcgaagtctattatactaaagtatgcggatgataaaacattactgttttggttacataatattgacaacagtaagagtgaaaaaaacagtaacgataaaccccttcaagggacaaaagacacttgattgaggaaagagaatgctggaatcagtaaccgacaatgttgtttatttgcagtagattgctgagaacagtaaaagagcgttttagaagggagatatagaaattatgatgtcagtagatcttggaatagatttggggacagccagtgtactggtatatgtgaaaggaaaaggggttgttctgaaagaaccatcagttgtcgcatttgatcgtgatacgaatgtgatcaaggcaattggtgaagaagcgcgtctgatgcttggaagaacaccgggaaatattattgcggtaagaccactcagacaaggagtaatctctgattataccgtgacggagaagatgattaagtattttgttcagaaagctttgggaaaacgtacatttaagaagccgagaatcagtatctgtgtaccaagtggtgttacagaagtagaaaaaaaagcagtggaagaggctacatttgcagccggagcaagagaagttcatctgattgaagaacctgtggcagcagcaataggagcagggatagatatttcaaagccttgtggaaatatgattgttgatatcggtggcggtacagcagatattgcagttatttcgctgggtggaacagttgtgaatacatcaattaagatagcgggtgatgatttcgatgaagcaatcgtacgctatatgagaaagaaacacaatcttctgattggagaaagaacggcagaagatatcaagattaagattggaacgacttatccacttgtagaagaagagaagatggaagtcagagggcgtaatctggtaacagggcttccgaagacagttacggtgacttcatctgagacagaagaagctttgagagaatctaccggacagattgtagaagctgtaatcggagtacttgagcagactccgccagagttgtcggcagatatccttgatcgtggaattgttcttaccggaggaggagcacttcttcgcggattggaagaattgatcgaagagagaacaggaattaatacgatgacagcggaggatccgatgaaagtcgttgcaattggtaccggacagtttgtggaatttatgagtggaagaaaagagttttaagagaaagaattctgaaaaacgaatttgaagtgtcaggttcttagagaagaagattcaattacaaggggtgtgtataataggaacacaccctttttctgcatataaataggaaaagatacaagaagagagaggaaaaagtgtggaaacagttacagggtatgtgagtcatattgtatatagaaattctgataatgggtatacagtattccatattgaacatgaagatggtgaagtgacatgcgtgggaagtctgaactatattaatgaaggagagcttcttgaaattcaaggagaatatgtgaatcataatgtttatggtaagcagttgaagatttctcattataaagtaaaagagccggaggatattgtttctattgaacgatatcttggctccggagcagtgaaaggtgtgggtgcggcactggctggccgaatcgtgaaaaagtttaaagaggatactttccgcattattgaagaagagccggaaagacttgcggagatcaaaggaatcagtgagagaaaagcacaggagattgcatctcagcttgaagaaaagaaagatatgcgaaaagccatgatttatctgcagaagtacggtatttccacaaagttggcagctaagatttatcagtattacggaatgaaagtgtataaagtgctggaagaaaatccgtatcagcttgcagataatattgaaggaatcggatttaagactgcggatgaaattgcatccaagattggcatacatacagattcagactatcgtatacgaagtggtttattttatacattgcaacaggcagtaggtgaggggcatgtgtatttaccacagaatatattgcttcgaagggcaaatgcacttttaggagttgatcttgaagatattgagaagtacatcatggatctgtgtatagagcggaaaacagttatgaaagaagtggatgaggaaattcgcatttatccagcacattattattacttggaattgaatactgcgaaaatgcttaatgatcttgatattgactgtcagatgccggaagacatgatggagaaacgtctgaaaagagtagaacagaaagaaaagatagaattggatccaatgcagcacagagctgttatagaagctattaaacatggtttgctcatattaacaggaggaccgggtacaggtaagacgacaacgatcaatacgatgattcaattttttgaaagcgaaggaatgagtatccttcttgcagcgccaacaggacgcgcggcaaagcgaatgacagaggctacaggatatgaagcccagacgattcacagactacttgaagtaagtggaaatcctgaggaagagaacagtgtaggtggatttttgagaaacagagagaatccacttgagacagatgttatcattatagatgagatgtccatggttgatttgaatctgatgcatgcgcttttatcagcagttattccgggaacaagacttattcttgtgggagatgtggatcagcttccgtccgtgggaccgggaagtgtgttaaaagatatcatacgctcagaaaaatttcacgtagtgacgcttacaaagatttttcgtcaggcaggagagagtgatattgtagtaaatgctcataagatcaatgcaggagaaccggttacaattgataataaaagccgggatttcttcttcttaaaacgccaggatgcgaatacgatcattagcgtcgttattactttaatacagaagaaattacccagatatgtgcaggctgacccaaatgaaatccaggtaatgacgccaacacgtaagggattgctgggtgtagaacgattgaatgtgattctacagcaatatctgaatccttcagattcccaaaaaacggagaaagaaattaatggtagattgttccgtgaaggtgacaaagtaatgcagattaaaaataattatcaattagagtgggaagtttctaccagatttggattaacagttgacaaaggaattggagtttttaacggtgatatgggagtcattgatgaaatcaatgaatatacagaaactgttatcgtggaatatgatgaggggagaaaggtaaaatatggatacgatatgacagatgagttagaacttgcctatgcgattacggttcataaatctcagggaagcgagtatccggcggtcattatcccacttcttccaggaccaaagttactatataacaggaatctgctttatacagcagtgacgcgggcaaaaaaatgtttaacaatagtagggagtgaactaacatttcaggaaatgatcgaaaacaaaagcgaacagggaagatttacaagcttagacgagcgaatcaaagaattttagaaaaaatgtatccaaaaagatgcccgttttgtcagggaatcagctcaaaaggtatttgcgatgactgtagaaaacaggttgttaaggtgggagaaataaaatgtatccattgcggaaagccattggaggatgaaacgaaagagtattgcagggattgtgaaagaagaaaaagtaattatgaacaaggacgcagcctatgggttcacattccgccggtttcgaattcagtatatcggttgaaatatcacaacaagcgatactatgcggaaatctttgggaaagagctggcagatgagtttgaatttcagattcgaagatgggggatccaggcaattattccaattccattacatagatcgaaaatgagaaaacgaggatataatcaggcagaacttttagcaaagcagttatcagaatgcatgggaattcctatggaaaaggatgttttatatcggattaagaaaacccggcctttaaaggaaatgaacggggagcagagacacagaaatctgaagggggcatttgcggtttcaaaatcgtggaatccacgccagaacattctactgattgatgatatttacacaaccggaagtacaatagaacgtgctgcaggaatcctgaaaaaagcaggtgttgaaaatgtctactttttgactctaagcattggacaaggtatctgaacatatggtatacttaggagagaaaactggaaaggtgaatgtcggatatgttagataaagacaggattcgtttaatgacaaaaatgtcgatatatgggaagaatcacaaagatgattttaaaattgccgattattacagaaaagattatgcaagtcttaagacgtggattacattgatctgggtaacaataggttatgcagttttgttcgttagtttctgcatttattcaagtgatagtttatctgctgatctgacaattttaaaactattcgttctcttgattgcagcaattgcaggctatatagttcttttggttatatatggggtttgcgcaaatagtttttataagagaaaacatgcagttgccaaacagaatgtaaaacgttattatcgtaatttgtcccgtttagagaagatgtgtaaaaaggagaagaatgaacaatgaacaatttactggttcttagagaaagatttaagcagatttatgtttctcactctctcttagttcgaaagggagcacagtttttgcttgcacttttggtgtttaacctgatcaattctaatattggatttatgaagatggcatcatctgttctttgtactgttggcttagcagtagtctgtacatttctccctctggcagtaatgacggcagcagcaactgtgttaatagtggctcatttatatacattatctatgccaatagccggagttacggtgatactgtttttgttaatgtatattttctactttcgatttaccccggagaagagctggctgattctgctgacggtagtagcgttcggcatgaaaataccactggtgattccggttatatttgggctgttaggtactacagtatggattgtccctgcatcctgcggaatccttgtttattatctgctttacctgatcaaagcttctgcaacagcattgaaaggtacagatggaacaacaatgatcagcactttaaccaattttacaaaacagtttgtaggctatcaagagatgtgggttatgctgtttgcagtagtgatcggaatactggtagtgaacggaattaaaaatcgggcagtcgatcattcctggaagatagcatcagcaacaggtacagcagtttgtataatcataggcgcatcaggaaatatctctttgggacttcatatgccttatacgatgatgatcttcagtggaattcttggtgttgtagcaggattgttccttgaagtgttttttttctctgtggattattcaagaacagagaatgttcagtttgaagatgacgaatactattattatgtaaaggcagttccgaaagtagtggttcagatgcctgagaagcaggtaaaacatattacagaacatcaggaacaggacgcagagatgccgaatgtgtcagagacagaaaataatactgctgtgtcagaagtttctgatttgaaggaagttgaacagaaagaggaagaaaatcagtcagaacaactgaaaaaggagtctgatcttgcacaaacaacaatttttaatgattcaaacatgacggaagatattcttttaacaagaagtctgagcaaggaactgggtctggatcagaatgaagagaaaaaagagtgatcgacagagcaaaagatgcaagagtgcataacaacgagtgattacataaggtggtgagacttgagatgatagagtggattcagaattttataagaaattattcaaatggaatgtattttccacatatacagataaaagatatcatagagattctgattgtgacgattattgtctatgaaatcatgctctggatcaagaacacaaaagcctggatgcttctgcgaggaatgcttatgctggggggatttattcttctggcatggctttttcaaatgaatacgatcctgtatctggcaaaagagtcaattaatgtattagcgattgcagcaattgttgtttttcagccagaacttagacgggcattggagaagctgggagagaagaatttatttagtaacattaatccgttcgataaaaataaagaaaatcagaggttttcggatgaaacactggatagtattgtaagagcttgttatgccatgggaagcgtatgtacaggagcactgatcgtggtagagcaggtgattcagttaacagagtatgaaatgacaggtatagagcttgattgtaaagtgtcttctcaggtgctgatcaatatttttgaacacaacaccccacttcatgacggcgcggtcattatcagaggggacagaattacatcagcaacatgctatctgccactttcagataacatgacaatcagtaaagatctgggaacaaggcatcgtgctgcattgggaatgagcgaggtttgcgatgctcttgtgattgttgtttcagaagaaacgggacttgtttctgtggcttccggaggacgattgcttcgagctattaacgcagaagaacttcggagtcagttaagccagattcagtatagaaagacagagacaaagaacaagttttctatacggaaaggatggcacagatcatgaaaaaatacaaattaacaacgaatcttccgcttaagattattgcatttgtttttgcagcatttctttggctgattgttgcgaatgttgctaatccggttacgaaatcaacctatacaaacatcaaagttacgatagcgaacgatgatgtgattgcacagggtggggaagtttatacggttttagatgatcagaatgtaaacgtagttgtttatgcaaaacgttcagtgattcaacagattaagtcagatgatattgtggctactgcggatattaaagaaatggattccaggacagggttgataccaatttcagtatcaattccaaagtatagtggatcttatcagtcggcagagtctgttccgagaaacatacagattaagacagaaccgacaggtaagaatgtatttacattgactgttagcacaaccggaacgcagcgtgacggttatcagattggagagatgaaagttaatccggaaaaaataacgattacaggagcagaatccacagtaaaatcaattgataaggctgtagcgaagattaatgtagatggaatttcgaaagatgaagaacttacagcagaacttgttttatatgatgcatctggaaatgtgatcaatcagggacagctaagtaataatcttggagaagatggaatcactgtagatgtgacagtgatgaggatcaagacggttccgttgaaatttgaagcatctggaacaccggcagatggatatgaatatctgggttgttcgagcgaaccagcgagcgtgcaggtctgcggaaaagaagaggctttatcccagattgaaagtatcaatattccagcatctgaattgtctattgatggggcaacagaaaagatagagaaagcattcgacattacagattatctgccggaaggtgtagaacttattgaaggcgcttcgggaaaggttaccgcaactgcaatgatcgaacagttgggaaatcgtacaattgagtttatggttgcatccatcaaacagaattatctggcaaaaaatcttcaggtgagttatgagccagatgctgaggtgacacttgtatttcagggagagaaagatacgctggatagtctggatatcagtaatgcagtatcggtaaacctacagaattacacgaaggaaggtacttatgatataccggtagaagtagatcttccagatggagtgacattgacaaaaccagtgtcagtgcagcttgtattgactgaaaaagaatccacagaagatgaacaaccggaaaataactctgagacaaattagtgatactttatattgttttgtgaattacaggtctaaattaaaaaagaattaagatggccggcattgacagttttcaatgcatattatatgatgttgaagttaaaacttcaaactatcaaagagatagaataggagaataatatgataagcgataaagtagtgatcaaaaatccgacaggacttcatttaagaccggcaggattgttttgtaaaactgcaatgcagtacaagagcaagatcacagtgtacaagaaaatgaaaaatgaagaagtgaatgcaaatgccaaaagtgtattaagtgtactgggtgcatgcataaaaagcggagatgagattacaattatttgtgaaggagaagatgaagaaacagcactttcagacatggttcaacttgtgaaagatggattgggagaataagtagtgtttataaaccggtatattgtaacagtgaagagacattaggaggaaaaagaaatgagcaaagcaacattagtaatcatggcggcaggcattggaagtcgttttggaggcggaatcaagcagctggctccgattggaccaaatggagagattatcatggactactccatctatgatgcattagaagcagggtttgacaaagttgtattcgttatccgcaaagatctcgagaaagatttcaaagagatcattggcaaccgtattaaaaaagaagtagaagtagcatatgcatttcaagagcttgatgatattccggaaaaattcagcggaaaattcacaggaagaacaaaaccttggggaacaggtcaggcaattctttgctgtaaagatgtggtggatgctccattccttgtaatcaatgcagatgattattatggaaaagaagcatttaaagaggcatacagttatttgacaaaccttccatctgctgatataatgcagatttgtatggtcagctttgtattgaaaaatacattgagtgataacggaggcgtgaccagaggtgtgtgcgaagtagacggacatggcatgcttgcagacattgaagagacacataacatcgaaaaagaagacggaaaagctgtaatccacaaagaggatggagatgtattccttgacgttgattcaccggtatctatgaatatgtggggaattacacctgaatttttcgagattcttaagacaggatttgatgagtttcttgagaaaacagaaagtacagatctaaaagcagaatatctgcttccgacaatgattggagatctgttaagtgatgggaaactggaagtaaaagtactgcagtcacatgaccagtggtttggggtgacatataaggaagataaagaatctgtaacagcagcacttcgtggattgatcgaaaaaggagtttacccgtcaaaattgttctaatttgagaaaagggatgtaagatggcaaaacgaaaagaatctgctggcaattctgcacgcagaaagaaaagtacagataagtattcccgcagatcgggaagtaataagctgggaactttgtgtatcattcttcagacgattgccagtatagccttaatggcggtattgtatttgttaggaatgattccggataagtatctgatactggtagcagcaatactgtttttcttatggtgtgtgacactgaattcacaggtggcaaggagaaaacgggggactttgggaaaagtgttcagtttacttatggctgttgtgatgtttacaggaagttattatgtcgctcaggctaataatatgattggaaagatcacaggcagcaactataaagtagataagatggttgttgcagtgcgagcagatgattcggcagagacaatagaagatgcggcagactatacgtatggtgtacagtttgagaaaggtgctggcaatatacagacagctgtgaccgatattgaaaagcagattggcgttgatacgatcgaagtaaaagagtatgattctgtccagacacaagcacaggctttgattgatggggattgtgatgcaatcatttataacagtgcatatacaagtctgatggaagaagcagtagatggttatagcgataaagtgaaagtgttgtatacatttaatatacgtgttgagttggatttcggaaattcaacaggagcaacagatgacagtattataaaagaaccatttacagtttatatcagtggtattgatgtttatggtgatgtatcagaaacaagtcgaagtgacgtgaatattattgcagttgtaaatccacaaacacatcagatattacttgtaacaacaccgcgtgattattatgttcctattccgggagtttcaggaggacagagagataagttaacacatgcgggaatctatggtatagatgcatctatgaaaactttgggtgaattatatgagacagatattaattattatgcaagattaaatttcacttcattaattgatattgttgatacgcttggcggaattgatgtatattctgaatttgcatttacgacaagtaaagattcagaatatactatggatgttcaggaagggtataatcattttaatggtaaagaagctcttgcattttgcagggaaagacacaatcttcctgatggagacaatcagagaggaaaaaatcagcaggcggttattactgcaatgctaaagaagtgtctgtcgcctacaatgcttttgaaggcaaatgcaattatggaacaggtcagcaaagatgttgagacaaatatgtctcaggaacagatcaatgctctgatcaagtatcagttgaataataatgcaacatggacaatccagtctatagcagcagaaggaacgaatacaaaaggtacttgttattccagtggagatacagaactctttattatggaaccgattgaatcttctgtgcagaatattattgatttggtgaatgttgttgaagaaggcggcatattgaccgaaggagaaaaattaaattaagaatgggtagaggaggcgcagaaatagtaagaagcgtctccttttttaaagttgattggtaatgatttcaaaaacgtaatgcagagaaatataaaacctgcacaatttatgaaaaaaataagtatagacattgaataatggaatgaaatttgataatatataagttatgtaaaaaacttgtaataatttgtaacattgttaatggagaggatttctatgaaaaatatattcagcttaaaaacatcaaaatcaagaatgatattactatttattgtagatgtcattacaattatagtggattcttacctagcgttgattgttagatataaaatggatgggaacacggttcctgtggaagatttggcaagtgttaatacgtatttgttgattaatatagttactacaatgatcatctttcttttattgaatttatataatagagtctggtcatatgcaagtctttatgaggcgctacttgtttgtgcagcggcaattttatcaacagcatttcaggcatttggaatgagtctgctttatctgacagtgccaagaagttttcatttgttctatttctttttcttgacaatgacaactttgatcacaagattttcttatcgtattttgcatgctcttcaaagaggtatctcaaagaacacaaatcgtccaatcaatacaatggtgatcggagcaggcgaagccggtaatataataatcactgagatgaaaacaagcaaacatttaaacagaaatgttgtgtgtgtaattgatgacaatccatcaaaaaccggaaaatatattcgcggagtacgcattgtcggcgatcgtacgaaaattaaagaggctgcgaaaaaatatgatgtagatgagattatgcttgcaattccatctgctgataataaagacaccagagatatcctgcgtatttgtaatgaaacaacctgtaagctgaaggtacttccaggcgtgtatcagctgatcaatgatgaggtaagtgtctcaaaattaagagaagtttctattgaggatttgctgggaagagatactgtgaagattgatattgacagtattgccggatatgtgagaggcaagagtgttcttgtaacgggaggtggtggctctatcggaagcgaactctgccgacagattgctgcacataatccgagaatgcttattatttttgatatatatgaaaataatgcatatgatatacagcaagaattaaaaaagaaatatccaaaacttagattagaagtgcttattggttcagttcgtaatacaaagagaattgaaagtgtgatggatctttatcgaccagatgtagtgtatcatgcagctgcacataagcatgtcccgctgatggaggacagtccgaatgaagcaattaaaaataatgtttttggaacttataagacagcacgtgcggcggataagtatggggtcaagaaatttgtactgatttctacagataaggctgttaatccaacaaacattatgggggcgtccaagagattatgtgagatgatcattcagacattcagtagatattccaagacggaatttgttgctgtgcgttttggaaatgtgcttggaagtaatggtagtgttattccattgtttaagaaacagatggcagccggaggtcctgtgacagttacacatccggatattatccgtttctttatgacaattccggaagctgtatcattggtaatgcaggcaggcgcattggctcatggaggagaaatcttcgtgcttgatatgggtgagccagttaaaattgctgatcttgccaagaatttaattcgtttgtcaggttatactcttggtgtggatatgaatattgagtatacaggacttcgaccaggagaaaaattgtatgaggagattctaacaaaagaggaaggtttacagaagacggcaaataatctgatttatgtgggacaaccgttagaatttgatgaggtacatttcttaagcgagttgaaaaaactcgaaattgctgcatcagaggaatcaagggatgtgaaaaaaatcgtatctggaattgtttcgacgtatcatatcagagaagaagataaagaacgtgatgaagagatgtatgaagaattattaagtcttggaaaagcgagtcacgaagaaccagttgtggaggatagatagatggaaaacagacatatagcattttcaccaccggatattacggaggaagagattgcagaggttgcagatactttaagaagtggatggataactacaggacctaagacaaagaaattcgaaaacgaaatagcagcattttgccatacgagtaaggcggtttgtcttaactcagctacagcatgtgcagagatgagtttacgtgttcttggaattggtccgggggatgaagtgattacaagtgcgtatacgtatactgcatcagcaagtgttgcagtacatgtaggtgcaacacttgtattagtagatactcagccggattcttatgagatggattatgaaaagctggaatctgcaattacagagaaaacaaaggcaatcattccggttgatcttggaggggtgatttgtgattacgacaagatatacgacattgtagaaaagaaaaagtcattattccgtccgagcacagagatacagaaaaagatgggaagaatagcggtagtagccgatggtgcgcatgcatttggtgctacaaaaaatggaaagcatagtggagaaattgcagattttacaagcttttcttttcatgcagtaaagaatcttacaacagcagaaggcggagcagcagtctggagagatattgacggaatagataatgaagaaatttacaaacagtttatgcttctttctctgcatggtcagtctaaagatgctttggctaagacacagctgggagcgtgggagtatgacattattgcgccgtattataaatgcaatatgacagatattatggcatctcttggacttgtacagttgagaagatacccatcgattttggcaagaagaaaagaaattatagaaaaatacaatgaaggattgaaagatctagatcttagtgtattgaaccattatggggatgattttgcgtcaagtggtcatttgtatcttgtcagattaaatggaaagacaagagaagaatgcaatgcagtaattacaaagatggctgaagcaggcgttgcaacaaatgttcattacaaaccgcttccacttttgacagcatacaaaaatcttggatttgatatcaaagattatccgaatgcttatgcactatttgaaaacgagattactttaccactccatacaaaactgacagatgaggatgtagagtatgtgattgaaacatttaggaaatgtgtaagtgaggtttaaaagatgtgcagatgggacgaattgcctcagaatatgcaagtgaaagaagtaaaaagatattatgatattttgcagcggcataaagcaagtttgattctgaagcgtctttttgatataatagtagcaggtgtgttgcttgtgcttttatcaccactgcttttgatactagcagtttgcattaaactggattctaaaggtccggttttctttcgacaagtaagagtgacgacatacggtaagacttttcggatttttaaattccgtacgatggttaacaacgcagataaaatcggaacgcaggttaccacgaaaggtgataccagaataacaaaagtaggaaaagcattacgcggatgcagattagatgaactaccgcagttgctcaacatattatctggagatatgacttttgtaggcaccagaccagaagttgaaaagtatgtagcccattatacagatgaaatgaaggcgacactgttattgccagcaggagtaacatcaagggcgagtattgaatataaagatgaagacaagcttcttgaatcagcagagaatgcagatcaggtttatatcgaacagattctgccagaaaagatgaaatataatttgaaagcaattgaagaatttagtttctggcaagatatcaagacgatgttagcaacagtaatagcagttataaaataacaaaggtatgaaggagaactcacaatgaacgtatggattgtgaatcattacgccattccaccgagtatggggggattggtgaggcattattatttttcaaagtaccttcagaagaagggacattcggtgaaaatctttacatccagtaagattcataatacagatattaatatgatcagggataaatctctttatagagaagagatggaagatggtgtagagtatacctttgttagaagccgtgattataaaggaaatggaatggacagagttatcaatatgatggatcttccatttaaaacctggaaggcaatgaagcggttttataagaaagaaaagccagatgtgatttatacatcttctccagatttatttgttgcattatttgcattattatttggtagaaagcataaaataccagttgttgtggaagtacgagatttatggccggagtcgattgtagaatataatggtatgtctcgaatgaatccaattattcaagtactgtatcagcttgaaaaatggatttacgtacacgcagatcaattgatttttacaatgtcgggcggaaaagagtacatatgcgataagggctggacgaaaaaagttaatatcaataaagtaaatcacgtaaataatggtgtcgatttagcagaatttgaagagaataaaaaattatataaccttgagaatagccagattgcgaatgataatgcatttaaagtagtttacatgggatctattcgaaaagtaaataatcttcagacattggttgatgctgcaaaagaattgaaaaatcaggatattcatttttatatttatggagatggcacagaaaaagacatgcttgaagatgagtgcagaaagtattcattgaatgttaaatttgaagggcgtgtagaaaagaaatatattccgtatattctgagcaatgctgatttgaacataattaatgttcagggggcaggcttaaataaatacggatgcagttggaataaactgtttgagtatatggcgagtgaaaagccgattttatgtaatcttccggtgaattatgatttaataagagagaaaaaattaggaattgcaaagcgatttgcgaatggaaaagaatatgcggaagagattacaaagtttcgtcaacttacttcagaagaatacggagagtattgccaacgtttaaaagaatgcgcacaagagtatgattatcagatactgacaaataaaattgagcggattttaaaaaaggcaattgatagttcaaaacgataagtttgttttgaagagaagcgagatagtaaaacagaggagtcattttgatgaaaataatgtttgtatcggcagcaaatagtacgcacactgttagatgggtgaatgcattagcagagagaggacatgaagtgtatcttgtttcaaacagaggccatgagccgaaagaagatgcactgaattcgagagtaaaattatacttgatgaaacacagtggtggcaaaggctattatctaaatgccggtgaattgagaaaaattgccaaaagaataaatccggatgtcattaacgtacattatgcaagcggttatgggacattggcgaggaaagcacgattacctaaatatattctttcagtatggggaagtgatgtatatgatttcccatatgaaagcagggtgaaaaatcatattttaaaaagaaatgtgagaagtgcttcttatttggcctcaacaagtaattgtatggctgtccaactgaaaaaagtaatgcaggatgaaaaactggaaattacgattaccccatttggagtggatttaaataagtttgatccgaaaaagtataaagaaatagaaaaagaagagctgataatagggaatataaaagctttagaagaaatttatggtatcgaagaaatgattcttgcatttcgggatctgaaaaaggaattggaacaggagcattactcaaggaagattaaattattaatttatggttcgggaagcaaaaaagaacagtatgaagatctgatcaataagcagaacctgcaggattctgttttcctgaaagggaaaatacctaacacgaaggtgccggaagcaataagcaaatttgatattttttgtgcattaagccggaaagagagttttggagtagcagcagtagaagccatggcgatgaaaaagcccgttgttgcatcggatgcagatggatttaaagaagttatagaagacggaaaaacaggattgattatttctcgaaaagaaataaataaggcaaaagatgcattgaagagacttgtgcttgatgaaaagatgcgcacaaagatgggaaataatggacgtcaacgagtggaacaactgtattcatggaatgacaatgtagagaaaatgcttaatttatatgaaagagtgaggtgtgacaatgaacattaaacaagaaaaaagatgtattgtccacatccccaaccatattgaaaaaagcggaaaatcgggctccaatatccgtccaatcaagatgaaacaggcatttgaagaaaatggttatcttgttgaatatatttcaggatatggcactgaaagaaaagttcaaataaacaagataaaacggaatataaggaacggtataaaatatgattttctttattcagagagttctacaatgccaactttgctgactgaaaaaaatcatttgcctcgttatccgtttttagattttagcttttttaaattttgcaagaaaaacgggataaaaatcggacttttttatagagatatacagtggaaattttctgtgtatcgtgataatgtatcatggtataagaagtgcttttcgattccaatgtacagatatgatttaaggcaatataaaaaattgcttaatgtattttatcttccaacagatgaaatgcgggcatacttaaaagaatatccggaattgttgaatagaagtgcaattcttatgccaggatgtgcggaatatgatgttgatgccgtgcaggcaatatcggatttgactgcaaaaaaactagaaatcttatatgtgggtggaattgacagaatctatgatttgacagtatttttccaggcgatgcagcagatgcctgatcaggttcatgcttatgtctgttgcagagaaaaagaatgggaaaatgcaaagagcaagtatttaccatatatgagcgaaaagatttccattattcatgagagtggacagggattagagccatattataaaaaagcagatatatgctgtgcctttgcaggtgaaggtgattatatgcgtatggcaatgccgataaaggtgtttgaatatttaggacattatataccgattatagcaaccaaagatacagcagcaggtaaatttattgaaaaagaaaacctgggatggagtatagaatataatcaggaagcattaaaacaatgcttgcataatatcttacaaaacccggcattactgcaggaaaagcgagaatcggaaatatcggcatacgaggctaatacatggaaagccagagcaaaacaggttattttagatttaaaataaaggagaagaaaaatgaaagaacaattattgaagaaaattgaaaacaaagaaatcgaagttggtgtagtaggtcttggatatgtaggacttccacttgctgtagagaaagcaaaagctggatttaagacaatcggatttgatgttcaggaagaaaaggtaaaccttgtaaatgaaggtcataattatatcggagatgttgtagacagtgatctgaagaaacttgttgacgagggaatgctgaaagcaacaacagactttagttttgtaaaagatgttgattttatcgctatctgcgtacctacaccattggattcccatcaggagccggacatcagctatgtaaaggcctcaacagaagctatttctaaatatcttacaaaaggaacaatggtagtacttgagtctacaacatatccgggaacaacagaagaactgatcaaaccaatccttgaagaaggatcaggattaaaatgcggagaagatttctatcttggattttctccagagcgtgttgatccaggtaacctgatctataagacaaaaaacacaccaaaggttgttggagcaatcggtaaagatgcgacagaggtaattgcaacaatgtaccgtgctgtacttgaaggtgatgtatatgaagtttcttcaccggcaatcgctgagatggagaagatccttgaaaacacatatagaaatatcaacattggtcttgtaaatgaactgactatgctttgtgatagaatgggaatcagcatgtgggaagttattgatgctgctaagacaaaaccatatggtttccaggcattctatccaggtccgggacttggcggacactgtatcccgcttgatccatattaccttacatggaaagcaagagagtatggattccatacatctatgatcgaaggatctatgattattaacgatcagatgccggaatactgcgtagagcgcgcaagcaaggttctgaatcgtcataagaaagctatgaacggagcaaaggtacttgttcttggtgttgcatacaagcaggatattgatgattatagagaaagtccggctcttcgtgtaattgaagtactcaaacgcgagatggcagatgttgatttctatgatccatggatttctgagtacaaatatcatggagagaaacatcagggaattgagaaaattgatccggaaatcattgcttcttacgacctgatcatggtaacagcagcacatacgaatgtagattatgacatgattcagaagaatgcaaaagcaatctttgatacaaagaatgttatgaagaatatcgagaacagagagaatattgaagttctgtaggaggatataaagatgaaatatgcattaattggttgtggaagaatttcaacaaatcatgtaaaagctgttgtaaataataagctcgaatttgtagctgcctgcgatgttgtaccggaacatatcgaaaatgttcttgcaaaacatggacttgaaaatgatacaagtattaaaagatatacagactacaaaaaaatgattgaagaaaatgaaatcgaacttgttggtattgcaacagaaagcggtcttcatgcagagattgctttgtactgtattgagcatggaatcaactgtattatcgagaaaccgatggcaatgagcattgaagatgcagataagattattaaactgtctgaggaaaaaggcgtaaaagtatctgcgtgtcatcagaatagatttaatgttgcagtccaggagatgagaaaagctcttgaagcaggaagatttggaaaactttcccatggttctattcatgtacgttggaacagaaatcaggattattacacacaggctccatggagaggaacatgggctcaggatggtggagcccttatgaatcagtgtattcatggaattgatcttcttcgttggatgatgggaaatgaaatcgatgaagtttatggtgtaacaaaacagcagttccaccattatcttgaagcagaagacatcggaatggcagttgtaaagttcaaaaatggagcagttgcaacaattgaaggaacaacaaatgtctatccacagaatcttgaggaaacattatatctgttcggtgagaatggtacagtcaagcttggtggaaaatctacaaataacattgatgtatggaattttgctgatgagacagatgatgatcaggcaaacaaaggacttgaagagcagacaagtaatgtatatggaaatggacacacaagtctttatgcagatgtaattgatgcaattaagaatgacagagcaccatatgttgatgcacatgcaggaagaaatgcactggagcttgttcttgcaatttataagagccagaaagaaggtcatgctgtaaaacttccactggagaattttgcaagtctggatatgacaggagaattttaatgagtgattattttgtacatgaaagcagctatatagatgacgatgttaaaatcggaaaaggcacaaaaatctggcatttttctcatattcaaagtggatcagaaataggagaaaactgttcttttggacagaatgtgaatgtgtcaaatcatgtaaaaattggaaatggcgtaaaagtacagaataatgtatccatttatgaaggggttgaattggaggactacgttttttgtggtccttctatggtttttacgaatgatttgacaccacgtgccaaatatccaaaaggaagtgccggatataagaagacacttttaaaagaaggttcaacagtaggtgcaaatgcaacgattgtatgtggtcatacaattggaaaatgggctatgatcgcagcgggtgctgtcgttacaaagaatgtaaaaaatcatgcattaatggcaggagttccggcaaaaagaatcggttgggtatgtgaatgcggaaatgttcttggaaaagatttgaaatgtgaatgttgtcatcgagaatatgaagaacatactgatggattaaaattaaaaaaacattaatgatcttttaaataaatatatgggtttttgcgaatataatggcaaagaatgtgaaaattagttaatacataatgctgagtaaatcggaacatgtgaaaaagagggataaatagaaatgcagtttagagatttaaagaaacaatatcaggtattaaaagaagaaatggatgttgcaatttctgaagtattagaaaattgtaattttatcagcggaaatcaggtaaaagaattagaggagcgtcttgcgaaatatgttggaagaaaacattgtattacatgcggaaatggtacagatgcgttaacgatgatgatgatggcatggaatatcaaagaaggagatgcagtttttgttccagatttcactttttttgcttcagcagaagtagtttcatttgaaggtgcaacacctgtattctatgatgttgatccggatagttttaatgcagatgtgacatctctgaaggatgcaattcaaaaagtaaaggatgagggaaaacttataccgcgtgcaattattgcagtagacctttttggacagccggcagattatgaaaaacttgaagcaattgcaaaagaaaacaatcttcttctgttggaggatgctgcgcagggatttggcggaagaattggtgacagagaggcatgtagtttcggtgatgcatctacaacatcatttttcccggcaaaaccattaggctgttatggtgacggtggagctatttttacagatgacgatgagacagcaaaattattagagtctatccgtgtacacggaaaaggacagtttaagtatgacaatgtacgtattggttggaattcaagacttgatacacttcaggcagcaattcttggagttaaacttactgcatttgaaaagaatgaactaaaagctgttaatgaagttgcaaagaagtatacagaagctctgtcagatattgttaagacaccatgtgttaagaacggattttattcaagctgggcacagtatacaattcagctgaagaatcaggaagaaagagatgggcttcaggcttacttaaaagaaaatggtgttccatctatggtttattatccgaagccgatgcatttacagacagcatttgctgatacaaagaagtatgtggattgttcggtttcagaggaactctgtaagaaagttcttgcattgccaatgcatccgtatatgaatgcggaagatttagagaaagtatgtaattgcgtgaaagattttttgaactagtcttgtaacagattgaaaggaagatattatgagacaattttgtggaatatttatgactaaactaaaagaatacgaacgaagacatccaatattgatcataatatggtctgtgttaattacagctcttcttgtggcaggagttatggtgggattatcattccgccataacactgcaaaagaagatgagtatatagtatttaataataaatatatagaaaaagaactacaacagattttaaaaaaagataaaataacgcaagaggatttagacagtctgcggacaatagatatagaagataatcaggaaattacagaaattgcggatctggctaagtgtaagaaacttactcagcttacaatcaaaaattgtaagttgaatgatatttcggcaatagaagggttaaatgaactccaggtgcttgatttatctggaaatgaaataaaggatataacagcgttatcaaaatgttattcattaactgaattgacattaacaaataatcagatatcagatatttcaccaatttacggattggaaaaaatacaaaaactggttatccagcaaaataatatcggaaatattcaagaaggaatcgaaaagatgaagagcctgacatttcttgatctttcaaagaaccgacttgtgaatataaatcaattagcaaaaattgaacagttaaatttcctgtacgcatcatcaaatatgctttctgaaacaccggagttagaaggcttgacaaatttaattctgttagatttggggaacaatgcattttctgaattaggatatttgggaaatcttgaacagttagaagaactcgatatttattctaatcatttggaagattttgatgttttaaaaagttgtccgaatataaaaagattaaatatttcatataatgagtattccgggttaaatggaattgagcagtgtccggatctcgagtttctaagcatgaaaggaacgaagataacggatattagcgtgttggaaaatcttcataattttaatacaatttatctggataatgattttgacagatcacagattgattttatgataggtaattttaagaatggtgatgaaaaaacaaagcagtatttattggataaacagtataatttaaatgattgagggttatattttggagatattacttatattggtgatttttgggatttcaacgattttgttcagtaaagcagcaggaacgttgaatcctggtaaggtaaatgttatatcatatatatattatattttcatgttacagacatttgcaggaacggctttaattttattaggatttgacaaacactatacactgggatatctgttaaatcgtgataaaagctgtatgattacagaagtagttgtttttggaattgcaattattttaccggcatttattttgctttgggagaaaatgttcagagtcaacatgaagaaacagtatcaggagtacttaaagaaagaaatagaatgtgaaaaagaagatttgatttttccttattttgcattgctttcaattgggtgtatcgtcttgttgataggtcttttggcgaagattggatatattccgcttttgaaattgattcatgcgtcagcggattttgattttgcgacagagagaaccagaataggaggactttattttatacatccatatttaagcaacatttttgttctgatgatggtaccgctgctttcttatgtggcatttgcatacatgctgaaaacaaagaaaataaaatggacaattatcacaattgctctatttatttcttctgttattataaagacatataaatttgaaaaatcatcggttgttttttattttgcagcctttataattatgttaatttattataagggtggcattaagatgatttatatgattatatctgttgcatttatggcagtaattatagtagcattttattttcatacaggtttttctggatcgctttttgacatttataatggaccgcttggaagaactttgtttacacaggtgggaaccctggcatattgttttgatttgttcccaacagtgttcggtttccttggaggccggagttttactccgacaattttaagattaattgggatgaatagcagtgattatttgagaagcgcaaaactgacaatggcattttatggatcagaaaaagtgtatgatggctcggccggagtaatgaatgctctttttgcaggtgaagcatacgccaattggggatataaaggtgtgatttttgcggtgatttgggttgctcttattttgagtctcgtagttttattaattatgaaacttaaaaaaacaccttctacattggcacttggagctgttttaacaattaaattaggaacagcgttggaaggtggattttgtgattttgtatatagctttgatcttatactaactgtactgtttttacttgcaatttattacttctttgaaagagaaggaaagatacaaaggtatatcacaggaatatcagaaaaggtgaaaggccagttcgtttatgggagaaaaaataaaaagtaagttaaatggtttgataaaaggaggcttttttcacatttttgtaggtaatacacttgtgaaaatgattgcttttgtttcaagtattgtaattgtacgtttagttgacaagacagattatgcttatttaacgtatgctgataatttatataactatgtagtttcatttgccggtcttggaatgacatcgtcgattcttaaatattgtgcggcggcagatactgaacaggaagatagagcatattttgaatttgcaatgaaatatggaactctatttgaagctatcttatctttgattgtagtactttatatagctttaacttcgattccatttcctaatgcgcgtagcgttgtatatatactggtgctttatcctgtttttaataatatattggctacagtacttagttatttgagagcacatggcgagaatgaggcgtatgcacgtgctgctgtggttcagacaacagttgtatttggatgtagtgtatgttttgttttattgattggtatcaaaggaattgcatttgccagatacgtggcgatcatagttgcaatcatatctgtatgggcagcactaaagagaaatatttctaaagagaaagcggcgaagctgagtccggaacagataaaggcatttatggtaatgtctatctcattaatgctttctaatctgttttcactgattatgccaatcaacgagatgacacttgttaatgaattactgaggaatgaaacaataacagcaaattataaaattgctattatgattcccggtcagttgtcattcgtgactcaatcaattattatttattattttactattattgcaaaagcatcagatggaaaagaagtgtggaatatttcaaagaaagttggtatgctgacagcaggagttattggtatcataactgttgcaggagcagtgcttagtccgtatatcataagaattgtgtacggaagtcgttatgaagatgcaactgctttatcaactgttttttggatagtatatgcgttgaatgcaggaatcagaatggttccaatgaattttctgccggcaataggagttgcaaaattcaatgcaataatggcagcaatttcttgtggagtacatttaatcattacttattttgcaatcagtcaatttggaatctggggagctggaattgcaacaggatttgtatatgtagtatcaggagtggtatactggatatattatcggaaaaagtgtttatatgattaaataacagattttatataacaaggggagagaacatgttagtttctttttgcgtgattgcatataatgaagaaaaagcacttgattcgttgttcaaagatattattgcacaagattatccacatggaaatatagaggtgattcttgtaaatgcaatgtcaacagatcaaacgagaaggaaaatggaacatttttcagaagaggatcatggctttagaagagttgttgttttggataatgcgaagaaaattcaggcagcaggatggaatgtagcaattacagcatcaaagggcgatattattttaagaattgatgcacatacaatgatcccgcacgattttgtatctaaaaatgttcaatgtatattgagtggagagaatgtgacaggaggtagaagaccgaacgtcgtagaagaagaaaccccttggaaacatacattgttgttggcagaatcttctatgtttggaagtagtattgcaccttatcgtaaaggaaatcacaaaacgtatgtgaagtctgtttttcatggagcatatcgcaaagaggtatttgaaaaagcagggctttttaatgaaagtttaggacgaacagaagataatgaaatgcattatcgtattcgaaaagcaggatataaaatttgttttaatccagatattatatcttatcagaatattagaaattcatggtgtggaatgttaaaacaaaaatatggaaatgggcattggattggcttgacgcttggggtttgtccgggatgcttttctattcatcattttgttcctttggcatttgtgtttgcactgattttaacaggaattatagcattgttgggaaacacaggaatgcttgtttgcttatgcatactatatgtgattgtcgatttgttaatgtcagtgttagctgttcaaaggcaaaagtggtacaattattatttgatgttgccattaatatttctatcactgcatctagcatatggagtaggaaccttaattggaattatagaaatgccattttgggtaaggaagattaagagggataaaaatgagtaaagagaagatatcatggaaacagaaagagcagattatatttatatgtgaaattttactatttgtaataggatctgtgttatttttggtatcaagagtgggaaatctctttaatctgggattagtggcaatcatgatattattctgtatgaatatcctgttcagtataaaaaactttaaagaaaattttttatattttttcatgcagcttacactttttacatttcaaatcagcagaccttttataggaatgtgcaaaggcagaaaatggtgggaagaaagttttcagaaagaggaaaatatttggtttgcattaactttgattgttattacagagactgcgctttatattggtgctaacattataaagttttttcatataaaaatcagagaaaacaatacacgttcttcagatagcatattttgtaaagcagaatttgtcagtaatctcagaaaggtttcaatgattgtgttttatgtaacaatgttgttttatcttattgagcaatttgaacctttgattaaaataggaactggaaattacttggattattacacaaattattccagtagtctgccaggtttctttcatacattggcctcttttgcacgttatagtatatgtgtatttcttgctacactaccagaaaagaaaaaaacgtttattccattgagcttatacgtcctttccacgattccaagtttgctgataggagtacggaatccggcaatgttaagtctcttgtttgtattatcttattatttactgcgagattatttagtagatgataagaaatggatcggaaaaattgaaaagggactccttgctatatgtgcaccagctttaattatttttatgggagtatacgcatatatacgtagtggcttaaagattgtaaccggaaactttttaacattaattgctgattttttctatggtcagggagtcacatttaacgttacagcaatagcatatggatatcgagaaggaatcagactatcacctcatttgaattttacatttggagatattatagactatatttatagaggaagtataggacagaaaatttttcatacagaaggcttgacgtcggcaaatagtgaatttaatgcccttcatagcaataatctttctcacattctttcttatttgagcatgaaagaagattatttgaatggtcgtggacgaggatccaattatttggtggagacatggttcgattttggatatgttggagcttttatattcagcattattttaggaattattttactatatatggtatatggttttggaaaaagagcgttgcttagtacaattattcttgtctcattgcaaaatattttctttattccacgagcggaagcaactggatggttaacatttattgtgtatattcaattttggctttgcattgctgtatgctatggtggaacgttgttttggtataagacaaagctatttgaccggttgaaaagaaaaaaagctctataattatttgcaggggaggaaaaggtatgaagcgaagaaaatggatggctttgatgttatgtgcgggaatatttatggcagatttttctggaataccgttaaaagtgtcagcagaacaggtggaacaggcagaaacggttttggatgatcaaggcacacagaaagatgatggtgaaaatacagaactgattcaagagacagaagatgaaaataattcagaagcatcgccaatcgaaacagaaccggaagaaagagcggcagaagatacaacaacggaagaattaccatcaacagaagtggtgacagaattaaaaactacaattgtcagtaataaaacagcaagagaatatgtggacagaaccgtagaattgacaacaaatgtcgaggatgcggtcggaaatgttgaataccagtatacagaagaatatagaggggaaacagctgttgttcaggaatacgcagaaaatccagtctattcatttaagacatctggcgttggtgaacatgtatatcgagtaaatgtaaaagatgaaaatggcaatatagggtcagcagagtataagattgaggtggttgcacatccatcgaaagttctttcaggaaaattaaccagtaataaaacacaaaaagaatatgtagacagaaagataacgttaactgcagaagcaacaaatggatatgggaattatcagtacaggtttactgagaagaaagacggtgtagaaacagcattacaggattatggtgacacaaatacctattcatttataacaaaggaatgtggcgaacatacatattatgtttacattaaagatgcagagggacaggaaatacagttatcctatacgatgacagttgtactgcatccgcaaaagaaattgatagcagagcttagttcgaataagacaaatcgagaatatatacaaagaacagttgttctgacagcagcagccaagggcggctatggaaagatcaaatatcagttttctgagacatatggatcaacaacggcagtaagacaggcttatagtgagaaaaacacgtatacttttaaaacttcaggaacgggacatcatgtgttttatgttgacatgattgatgaacagggacagaaatctagagcatcttatgagatggatattgttgctcacccggataatgtgttgacaggtagtgtgacaagtaacaagacgacaaaagaatatatcgatagaaatatctgcttaacagcaaatgcaaaaggtggttatggttcacttaaatatcagtttgtagaatcttataatggaaaagtaactgtcgttcagaagtatagtgaaaagaagacgtattcatttaagacaacagggccaggaacgcatacttattatgtatatataaaggataaagagaatcagagtacaaaactcaaatattccatgactgttgtagtacatccagataaagtaataaaagcaggtctcagaagcaataagacaacgagagaatatgcaaaaagaactgttacattaactggcagtggagtgggtggatacggaaaacgtcagtatcagtttactgaagtatatggagcaactacaaaggtaagacagagttatagttataaaaacacatattcttttacaacgacggggattggaacacatattttctatgtggatgtaaaagatgatgaaggccaggtggtacgtgcaacgtacacaatgcaggtagtggtacatccggataatcagttaagaggttcctttgtaagtaatacaaatggtatagcaaaaaacggacaaaaaatacagttgactgcaacttccagtggaggttatgataatgttcacaaatatcgtttcagagaagtatatggtggaaataacaaagttttacaaaattattctactaaaaagtcatgtgaatttacgttctcaggaaatggagcacatacatattatgtagatatactggattcagaaagtcagattttaacattgagcttaaggataacatctccaacctatgtggatagaatgtcagtattctctacagtgtctacaaataatgaaaatggaacatataatatgagtagagcattaaagagctttaatcaggttgtcattcagccgggacagaccctttcattttttggcgtggcagggccatgtggaaaagcagagggatataagcaggcaggagttgtaggtggtgttggatatggcggaggtatctgtcaggcgagtacaacgctttacggagcagcaataagagccggacttacaattgttcagagaagaaaccattctgttccatctacatatgtgccgatcggtcaggatgcaatggtagattatggatcatcagatttgaaattcagaaatgactatgattatccggtgaaactggtgacatatgtcagtggaaaaacattgtatgctgaagtttggggaatccaaccagactggtatgattatgttaatgtacgatcatggagtacaggaagcaaatcagcggttgcttatagagattatgttaaaaacggaaaaacagtaaaaacagaacagcttccaagttcatattacaaataatttaaaataccatgttatagaaaaagactgattggaaaatcagtctttttttaaacgcatttttgtgttattatcatagagaaatctgtggggagcaataagccagaggaggttaaggtatatgaaaaagctattagtagttgtaatgttgacaagtatggtgcttttttcagtgggatgtgagaaaaacaatgtggatacagaacaaaatactacagtagaggattcaggcaataaggatacaagtgaaacgatagattctgaaaaaaataatcaaaaacaggaggaagaaaaaagcaatatttcagaagaaaagcaagagatgaagacgttgaaaatttactatgtgaatgaaaatgctgaaatcgtttcggaagagatgaagacagaaaacatagatgatacaacagtttggaatcaattaatagaaaaaggtattctgacagaaggttgtaaattgaacagttgtaaaattgacgagaataataaaacaatagatctggatatgaatacagaagttggtgaacgtatcagaagtatggggaccacagggaaagatgaaatacttacatgtattgtgaactcctatttggatacatataactgtgagaaacttaaattaacagagaatggacaggcattagatacaggtgatacagagttagatggatacatgaatcacttctgatggaaataagagcaattgataaacatagaaaataagtaggaggaaaaaatgatatcaaaaataagaacttgtctggtcgcaatattagcagcagcaactgtggttacatcagtaccggtttatgcaacagacacaaaagtggatacaaatatagaaacagttgaaaatcaaccatcagacagtgagcagatagaagaaaatcaagttcagaatgcaatagagcagcacctgaattatttgtacatagaaagtccgtacgtagaaactccggcaacacagagaattgttgtttcctggggggatggaacagaaaatattgaagagattgatttaagtgtagaacataatggggatacacaaacatggacttctgtaaaatcagaagacggtgtctttctatatgagaaggcatatgcagatggagaggatggaatttatacaataaccaaattgacagtaaagacagcagagatggaaacaagttatttgctgtcggatcttggaatggaagcaaaatttggtgttaatgaaacatatgaaggaatgtcagaattacagccgattgaaggacaaccggatgcagaagcagcaactgatgaggagcagtatgatgttgctgttatgagtattgatgaagatggaaatgtgatggaagagtccagtatagaagatgcattggagaaagcggaagttgaagaatatggttcggatgaagatattcagacttatgcagaggataatgcaagagctgtagatgattcgagagctgtcaataagaatgttgtggttgctctagatccgggacatgattcaacacacacaggagcaggagcaaatggtgtaagagaggaagttttaactttaaagattgcaaaatattgtaaggaagaattggaaaagtatgcgaatgtgtcggtttacatgacacgaacgacagcagcatgcccatatccaagcaataagaacagtggtggggatatcagtgacagagtatatgcggctgcaaaagcaggggcaagtatatttgttagctttcatttgaattcttctacatcgacttcagcaaaaggtgcagaagtaattgtaccaaatgatagttggaaaccagaagttgcacagcagggaaaagagctggcgaatgacattatggatgagctgactgcgattggtttgcagaaaagatctatttatagtaaagatacaacactggcagatgaaaagtatccagatggatcaaaatcagattatttttcggttcagattgcagcgaaagaaaataatattcctggaattatagtagaacatgcatttgtaacgaatacaggcgatgtaaatacatatctgaataatgaagctgggttaaaaaaactcggtgttgcggatgctactggtatagcaaagtatttaggagtatctaaggaaaaaggaacttgggtagaggattccaatggatggaaatataaagaaggcggaaaatatgtaactaattcctggaaagatattgatggaaagagatattattttgacgcaaatggatatcgggtgacaggctggcagacaattggtggaaaaaaatacttcttcatgccagaaggttatatgatgaccggttggatttcttttggaagtacaagatattatctgatgcccgatggacatatgctgacaggctggtgtagctttggaagtacaaagtattatcttgcatcagatggaaagatggtacgaggttggcagacaattgatggaaaacgatattattttaatgatgatggagtgatgcagacaggctggcagacaatcaatggaaagaaatacttcttcatgccggaaggttatatgatgaccggctggatttcttttggaagtacaagatattatctggataaaaacggagtaatgcagacaggctggcagacaatcgatggaaagagatatttctttatgccggaaggttatatgatgcgtggctggatttcttttggacagacgagatatcatttggatgcgaatggagtgatgcagacaggttggcagacaattagtgaaaaaagatatttctttatgccagaaggctatatgatgcgtggctggatttcttttggacagacgaaatactatctgagtacggatggagtgatgcagacaggctggcagacaatcgatggaaagagatatttctttatgccggaaggctatatgatgcgcggctggatttcttttggtaagacaaggtattatctggattctaatggtgtgatggtgacaggaaaacaggtgattgacgggacaacgtatacgtttgcttctgacggtaagctgattgtagagagtaaacgtggttggaaaacagtaaatggaaaaaaatattattacaatgaaaatggagtagcagtaacaggctggcagacgatcgatggaaagaaatatttctttatgccggaaggttacatgatgaccggttggatttcttttggaagcacgaaatattatcttggcacagatggagtgatgcggacaggctggcagacaattaatggaaagaaatatttctttatgccggaaggttatatgatgaccggttggatttcttttggtcagacgagatattatctgatgccggatggacatatgctgacaggatggtgcagctttggaagtacaaagtattatcttgcatcagacggaaaaatggtacgaggctggcagacaatcagtggaaagaaatattattttaatacggatggaattatgcagacaggctggcagacaattgacggaaagaaatatttctttatgccggaaggctacatgatgaccggttggatttcttttggaaaaacaagatattatttggataaaaacggagtgatgcagacaggatggcaatttatatccaatacatggtattatttccgaaccaatggaacattggatgattcttgtactacagatcagttgatggctatttctggaaagactactgtgactgcatcccagatggaaaaatattttaaggctaagggtgcaacatatccggcatattacgctgagacggatgcgccaacacttgaaaagttctgtcagatttacgttgaagaagcgaatgcggaaggaatcaatggggcaattgcatttacacaggcaatgaaagagactgcatggcttaaatttggtggtgatgttaagattgaacagaataattttgcaggacttggaacaactggtggcggcgttgccggagcatcatttactacagtacgcgaaggaatacgagctcagattcagcatttgaaagcatatggatccaaagatgcattaaagaatgaatgcgtagatccaagattttcattggttacaagaggaagcgctccttatgtggaatggcttggtcagaaagaaaatccaaatggatatggctgggctacaagtgaaggatatggtattgatattgaaaaaatggtgaagaatctgcaaacatattaaagaaataatagtttgggcgtctattgtaagttcaataggcgccttcttagtaaaacgatattcattgttcactatgcagatggagaatattcagaatgaaaaaaatatgttttgttaattatgatatgacagtaacaggaggagttgagcaagtcacaacaactcttgccaatgagttttgtaaagaatatgaagtatatatttatgcaatttttggaaaaggagggcatgttccatatgacctggatccgagaatcacatacagagcagaactagaagaagagtgtcgagtacgcgacagaattaagaagacatttcaaccatttagagaatttgttagacaaaatcaaatagatgtagttttccttatggagaattatcctgctatgacggtttcaccggttcgtttttttacgaaagcaaagtatgtgttttgcgatcatggtgcattgatgaatgaatgggagaagaaagatatccgctttttccgtttctgggattcgttaatttcacattgtacagtgacattgacggagcagaacagacaggattatattagaaaatttcatataaatccaaagaaaatccgaagtatatataattggatcaaaccagaaatcctgactatgcgaaagaaatacaaagcggattcgagaaaaatcatcacagttggaagattcagtgaagaaaagggatatgatcttctggtagaagtggcgaaaaaagtattgccttctcatcctgagtgggaatggcatttatacgggacgggagatacttttgacgagatacaccaaaaggtggtagaatacaatttaacgtctcaattgattcagaaagggaatgtaaaagatgtgtataagttgtataatgaatatgcatttttggtattaccatcttacagggaaggattgccgttagtattgcttgaggcaaaggcaagtggacttcctatggtgagttttgatgtgacaacagggccaagagaaatcgttgaggagggaaaggatggctatttaatccccccttatgatttggacaagatggcaaatcgtatagaattgttgacggatagtgaagaacgaagaattgcgttttcaaatcatacgatatcgggtgtaaaaaaatttgaaaaagaagagatttatcgacagtggacgaatctgatagatgaactgacaatggaaaggaagtaattggaaagtaaatgaaagtattacaagttggattatcctttaatcccggaggtattgaaagttttgtgatgacatattataggaaattgagtaagcaaggagtaagatttgattttataagtatgtttccacaccttgcgtatgaagaagaaatcaagtcacttggaggaaaagtgtttcatacgtgtgatgcaagaaaacatccattgaagttcagcagacaaatgagaaagatacttcgaattggaagatatgatgcagttcatgtaaatatgctgtcagcagcgaatatagtaccgctgattgtggcaagctatggaaaggttccaacagtgatcgcacactcacataattcttcgactccgggagtggtgagaaatttgttgcacagaattaaccgaccgttgattccaatgtttgctacaaagtattttgcatgcagtgaattggctggaaaatggctcttttcaaaaaagatcagaaagagtaacaattatcatcttatccacaatgctcttgatctgaaaaaatttgctttcagtttgtcagaacgtgaagagatccgtcatgaactgggagtagaaggaaaatttgtgctcggacatgtgggacgttttgaagaacagaagaatcataaatttctcttagaaatctttcgtgaggttgcatctgcctgtgaagaagctatacttttgttagttggagaaggagaacttcaggaaatgatccaaaagaaagctgaggaatacggaatagaagataggatcagatttttagggatcagaaaagatgttgcaaaattatggaaaggaatggacatttttgtattcccatctctttttgagggacttcctattgttgcgttggaagcgcaggcatccggaatcaggagtgtaatggcagatacgattacaacagaagtgaagttagttgaaaaagtgaaatttctgtcacttcaggattcaccaaaggaatggagccgtgtgattctttcttacaaaggtgaaaataggagcgaagaagaaaattcaggaatcaggcaggcatttgcaaaagcaggatatgatattgaaagcgctgcgcagactctgctttcatactatgaataaaatggaggagatatcatgccgacaatcagtgtgatcgtaccggtttataaagttgaaccatatataagaaagtgtgtggattccattttgggacagacattttctgatattcaggtgattctggtagacgatgggagtcccgaccagtgtggaaaaatatgtgatgaatatgcaaaacaggacaatcgagtggaagtgatacataaggaaaatggtggacttagtgatgccagaaatgctggaattccctatgcaaaaggagaatatatcatttttttagacagtgatgactatattgaaaatgatatgtttgaatatatgtatacacgtatcaaagatagcggagcagatatggcaacatgtggcttatatgaagtgtataaagacagaatcgagacacaaaaggaagaggtggattttgtctgcacaggagaagaggcttttcgctgtatcctcagggggcatacgatccgtggagaaatatggaataagctgatccggaaaagctgtattgaagatcttcgctttccgaaggggagactgtatgaagatatttattatactgtagacctcatgcagcgaattaagaaagtggcagtaggaacaaagccgaagtattattatcttcatcgagaagacagtattaccggaaaggcataccgtccgaaagtatttgacataatagatggatatacaaagaattatgaagtagtgaaagaaaaatttccatcactaacacaggaggcagagtgcctctggatctggtctcgctttattgttctggataagatgctattacaggaggattataagaagttagaaggatatcaggatttgaaacgctttattcgcgggcatatcctgacaatcctgcgaaatccatattttcagccaaagagaaagatttcatctgttgtattgtgcgtaaatacgggcttgtacaggaagatggtattcatgagtgaggaaaagaaaaagtagaggaaaggaaatctcatgagaggaaaacaggcattaaaaaacatggtggcaagtctgcttttacaggtaattgttcttttgtctggattgatattgccacgttttattcttgaggcatatggatcgagtgtgaatggaatgatcacttcagtaaatcagtttttaacatatctgggcctggcagaagcaggagtaggaacggcaacagttgttgctctctatacacctcttgcattgaatcagacggaagaagtaaattcaattctttcggcgtcaagaaaattttataacaaatccggaatgttatttctggcattgacactggtacttgtaggtgtctatccgttttttatttcaggacagcttgaaaatagtcttgtgcgttggatgatacttgttttggcaggaagtactttagtggattatttttttctgggtaaatacagagttttattgactgcaaatcaggaaggatatgtggttgcactgattcaggcagcaggaacgatcgttaatatggttgtttctatttttctgatttatattggagcaggtgttctttttgtaaaggcagttgcaactggtgtgtatatgcttcgtcttgtattggttaaaatctatgcaaaacgaaaatatcctgcattagatttccatgcagaaccgaatgaaggtgcgttaaagcaaaaaaacgcggcactgcttcatcaggttgttggtattattgtaaataatacagatacaacagtgttgacaatttgtctgggggcaaaatctcttcttgaagtcagtgtgtatggaatttatatgatggtggttaatgcagtgaatcagctgatgacctctttttcgaatggtctgacagcaggatttggagaagtgatcgccaagaatgaggaagagacattaaagaagagctattctagttatgagtatatgtattttgtaatcatgtttattgtgattgcctgtatgggagtcttaatcttgccttttgtcggggtatataccattaacctgacggatgtacagtatgtgcgtccggttcttggaattttatttacagtaattgtttttatgcaaaatgtaaggattccaggattgacgattatctgcgcagcagggcattataaagaaacgagatatcaggcgattttagaagcagtgataaatatcacggtttctcttgggctggtatggaagttcggcatggcaggagttcttcttggtacagtatgttcttatggatatcgctcttttgaaattgtgttctatacaagtcggcatctggtaaaaggatgtgcaaaaaaatctatgttccgaatttttagaaatgtacttgtcgttgcacttctttgtattgttggaacatatgttattcctaagaacatggcatcttttatcacatggtttctctatgcaatcggaatggtggctgtaagcgtatttactattgttggggtaaattatgtggttgaaccggatgagttcaaagaacttgtacttagggtgaaggggattttaagaacaaagtgaaaatgagataaatatattagttatagatatgaatggaaggagtgaagtgaaaatatggaaaaaagtgttcaatccacaaagataattaaccgtaatacttcaattgagttacttcgaatcatctctatgattatgatcatgtttcaccattttgcttatcatggaaattttgaatggaattttaatgaggttacacttccacatctttggtatgattttattctcatgggtgggaaagttggtgtagatattttcgtattgatttctggatattttctgattgaaaatacagaaaagttatttcagcctaaaaaacttttgaaattttggggacaggttgttttttattcaattatgacatatcttttatcggtaatgttacgattgaatgcttttgagataaagcaattgattaaagtttgtcttcctatcacgtatccgggttggtggtttgcaagtacatattttatgttatatttaatacatccgtttttaaataaactgttgcatgggttgagtaagacagaatatcagtacttgatcttgatgatggttttgtgctggtcaatcatacctacggctacaactcagttatttgagagtaattcattattgtggtttgtaacattatatggaattgcaggatatgtaaatttgtatggaggtaatcagaaacttcaatcgaaacattatttttctctttattttatggtgttaattataacatatacagtaagtacgacgtttctttttcttggaacaaaaaaagaggagtggtcaacacatgcaattgatttttttgaaatagagagacttccaattttgttgatggcgattacactttttatgggatttgtaacattgaaaatgaactatcataaatggattaatatgattgcatcagcaacatttggggtatacctaattcatgacagttcttatattcgttattatttatggacgaatatctttaaaatcaatcaatatcaggatagtacttttctgatattatattcaattttggttgtgtttattttatatgtttcttgtactatgattgatttaattcgaaaaaaattggttgaaaaaccgtatatgctatttgtgaaccattatacatattattttttgaaatcgtttaagataatctgcgaaatgttcagaaagtggattttcggatagtatattggaatagcttcaaggaaaaaaggaaatctgtaaataatgattcatacaagatttctttcgcttccgggtggacaactccattcaaacagtgtacaataggatggtatataagtttaagacaacaaaagaaggggtaattatatgaaagcaaagaaattggcagcagtagcattatcactgtgtcttacagtgccaatgttcagcacaatcgtaagtgcagctgatggttctctgatgttctctgatccacagacaaaggttggagaggaagtaagtgtagatcttgttgtgagatccgatgattcagctgttggtgatgcagatattacaatgagttatgatacttctgcacttcagtttgaaagcggagagggtgtaacagcagacagtgatggcaagcttacatactcaggaagcggagacggaacagcgacagagcttcgtactacaatgaagtttaaagccttgaagatgggagacacaacgatcacagttgacagctcaaaggcttatctgtattcggatgagacgctgacattagatcagggatcttccgcaattaagattgaacaggcagatgatggttcaacagaagttgaggcaactggcagtacagcagcaggtacggctacagatatcacagtaagtgtgaacggaacagattacaatttttcagaagaatttgcaacatctgcgattccggtaggatacagtgagactacaaaaacattcaatggagaagagcacaagtttgttgctaatgaggctggtgttacacttggatatctggtagatgcttccggagaaggaaagttcttcctctacaatgaagatgattctacatttgctccgtatacagaactgaagatttctgacacaacatctattattcttttagcagataatggaggagcaaaacttccggattcataccaggaaggggaacttacagtagcagatcagacatatccatattgggcaaacccggagaatgatcgttatgatcttctgtatgcagtgaatacaagaacaggtgaaaaagggttctatcagtatgattcacaggatggaacttatcagagtgtagatgttcagacaacagacagtacaaagaaggaagcaaaagggattgttggaaaattggagtcgcttgtaaaagagcatccaattgttcttctggctggaggagcactcatcgtagttgtattacttgttcttatgattatgtttgcagtaaaacttgtgcatagaaatcaggaacttgatgatttgtatgacgagtatgatattccttttgaagatgaagaagatgacgagccggttgctgctaagaagtcagacagaaaggcgtttggacgtaaaaaagtaaaagatgatgattatgacgatggttatgatgatgattttaatgatgattacgatgcctttgatgatgagtatgctgattatgattttgatgatgattacgatgatgattatgacgatgaatatgatgcaccgacaggaaatacaagaaatttaggaagatcagctaaaaaatcaaaaaaagaaagaaaatcagatgattatgatgtagatttcattgatctgtaagtttaagagacagatgaaagatactggttagctggttgaaaaaatatagacaggattagaacggattaagaaggaagttctgatcctgtttttctatcgttcttttcaatctttattaattgattatacacagatttatcacaatgcggagttactatgtaaacatcaaagaaaaagaataaacaagagaagaggtaatctttatggagaatcaatataattattataattcggatggaatgaatggaaaaggacagggtgaaacaccatttcatgatgacaatggtggtcagaaacatcaagtaccgcatggtaagaaaccacaaaagaaaattcccaaagcagtggcagtgacaggatttgcactattgtttggagttgtttccagtggtacatttttggcatcaaatgttgttggaagtaaagtgctgggattgaccggtgtgacgaagactaatactacggcaaccaaatctgtgagcagcaatgcttcattatccaaatcttccagtgttgtaacttcagatgtttcaagtattgtggaaaatgtaatgccatcaatcgtatcaattacaaatatgagtgtgcagcaggttcaggatttctttggtggtgtgtcacagcaacagagcgaaagtgctggaacaggaatcattatttctcaaaatgattcagaacttctggttgttacaaataatcatgtagtagcaggaagcgatacattaacagttacgtttgatgatggaacaagtgttgaggcgaatatcaaaggaacaaactcagagtatgatattgctgttgtggctgttccgcttgattctatttcagatgatacgatgaaagcaatttcggtagcaacactcggagattccacacagctaaaggttggagaacctgcgattgcaatcggtaatgcacttggctatggacagtcagtaacaactggtgtaatcagtgctttgaatcgttctgtttctgaaacaaacgagcagaccggtgagacaacagagagtgatgccaaactgattcagacagatgcagccattaatcctggaaacagtggtggagcacttgtaaatgcaagtggcgaagtgattggaattaactcatctaagctggttggtgattctgtagaaggtgtcggatacgcaattccaatcagtgatgtatccgatctgatccagaatctgatgaatcaggcgacaaagacaaaggttgcagaaaaagatcagggcgcaattggcatcaaaggaatgagcgtgccggctgaatattccaaacagctgaatatgccggaaggcgtttatgtatcagaaattacaaaaggcggtggagcagaggcagccggaatggcaaaaggaagtgttatcacagcaattgacggaacaaccgtatcaagcatggatgatcttcaggaacagtttcaatattatgccaaaggagataaggtgtcactgacaattcagattccacagagtaatggagaatatgaagagaagacagtggaagttactttaggtgcaaaataaaaactacttttaagtgaatgcattatgcttagggattgtcacgtggcaatcccttttgctgttgttcacaatttttcttatcttccatacaataacaaaaaagatataaggatttattttatggcaccatattgttctaataggaatacgaactgttattgtcagaatggaaattacaggccacaaacaaggcaggaaaatgaaagacagcttcattgcaatattcctgttcctccacttccggagcagaagtcgaaaaattattgttgcgatgagtgtgttggtgattacagcaaaacggatgttttgcaagagtttccggttgcgatggcttatgtcccatggcagcagtggagaaaacttcacgatctcggttatggatttcagtgtggaactatttttcaagagcttgaaaaaccatttcgtggaaaaggaggatgctgtaaatgagttgcaattgtcatgaaatgaatcgaagagaactttttgaatatataaatcagattagtttcgcggtggatgatgttaaattattcttagatacgcaccctgaaaatcagaaagcacttgaatattttcaaaaatataaagagaaacgtattgaagcactcaaagaatatgcagaggtatatggacctttaactgtagatacagtcagcgaaaacagtgactgctggaattggatcaatgaaccatggccgtggcaggaagggggatgctgatttatgtggaattatgaaaaaagacttcaatatcctgtgaagataacccagacgaatccgaaactggcgaagatcattataagtcagttcggtggtccggatggcgaattagctgcatctatgcgttatctttcacagcgatatacgatgccatataaagaggtaacaggaatactgactgatattggtacagaagaacttgcccatatggagatgatctgtgcaattatctatcagctgacaaagaatttgtcaccggaagaaattgaacgttccggttttgcaccgtattatgttgatcatacactggcattatggccacaggcagccagtggagctccgtggactgcaacgtatttccaatcgaagggagatccgattacagatcttcatgaagatcttgcagcagagcaaaaagcacggactacgtatgataatatcctgcggctgattaaagatcctgaaatctgtgatccgatccgttttctgagagaaagagagattgtgcattatcagagatttggtgaaagtctaagaattgtacaggaacatcttgacagtaagaatttctatgcgatcaacccagaatttgaatgaagatgaagtgtttattttgtgaaagggattgtcagacggcaatccctgatttacattttatgtaaatactgctcaaaaatccccctttacttttccctataaatcagatataatatacgcgttgatggggaaaccataacaattaaatatacgatcaatggggatactgtgatgttatactcacagtatttttctgtttttctgatgaaagggacttttttccctgagtaaaagaggctataataaaagagatttattgtctggtgtaaatatacgttacagttcactcccgtgtcaatcactctgctgattgacacggaggatgcatgttttggcttgaatgcatctcgccccatcgccaaaggcgatttaaaatggcgagatgcgttgctggtcgcacaacgtgtgaacagtaacaaatatacagttgacagtaattaaaaaaggagaaggcatatgtgtggatttgcaggatttgtcggagaagttgatgacagagaacaggtacttgttaatatgatgaatacaatcgtacacaggggaccggatagtgcgggaaagtatgtggatgaagatgcagcactcggatttcgccgtctgagtatcatagatctttcttccgttggtgatcagccgttgtacaatgaggatcgcagcatggttcttgtatttaatggagagatttataattaccaggacctgagagaagaactgaaagcggcaggtcatgagtttgtatcgaatacagattcagagacactgattcatggatacgaagagtggggcgagaaactggtagaccgtcttcgcggaatgtatgcttttgcaatctgggatacaaagaagaaaagattgtttgcagcgagagatatttttggaatcaaaccgctatattatgcgaatatgaatggtacattgatgtttgcttctgaaatcaaagcatttatggagcatccgaagtttgataaggtgttcaatgaagaggcgcttggcaactatctttctttccagtttgttcctacgaatgagacattttttaaaggggtgttctgtgtacagccaggacattactttatatatgaaaatggaaaaatgaacattacacgttattttgaacctcatttcacaggagactgtaagaagcctttcaaagaagtggtggatgatgtagaacgtgtgatgaaggattccgttgagaagcataaaatcagtgatgtagaggttgcttcttacctttccagtggtgtggactccagttatctgacttatctgggacaggtggatcgtacttttacagtcggatttgatgaaggaaagtacagtgagattcaggatgcaaaggaatttgcagcaagcattaacatgaagaatgacgctaaggtgatttcaccggaagaatattgggataagctttcggatattcagtattatatggatgagccggtcgcagatccagctgcaatcgcactttatttcctcagtgcagaagcgtccaagaaggttaaggtagttctttcaggagaaggttctgatgaattgtttggaggatataacatatattgtgaacctttggaacatacttcttttaataaaataccgatgccggtacgccgtttcctgggtgcgtttgcagaacgctgtctgccacgtggtatgaagggaagaggtttccttatgcgtcacggaaagacattggaagagagatatttcgcaaatgcgacgaatatttttacagagcgtgaggcaaatcgtattttgaaaaaaggatgtaagccgggaatccaaaaagtgacaaaaccattgtatgcgcgcgtgaaaggaaaagatcctgtgacaaagatgcagtatgtggatcttcatttatggctggtgcatgatattctgatgaagggtgacaagatgggaatggcgaattctcttgaagtcagagttccgttccttgacagagaagtacttgaacttgccgagacacttccgttaaaatacaaagtacgtgcgccaaagacgaaggttgcattgcgtgctgcggcagagcgacatatcagaagtaagacagcggagaagaagaaactgggattcccaattccgattcgtgtatggttgaaggaagagaagtattataatattgtaaaagagatgtttgagtctgatgcagcgaagaagttctttgatacgaagctcttgcttaagatgcttgatgatcataagaacggaaagaatacgaatgagaagacggataacagccgtaagatctggacagtttatatcttcctcgtatggtatgacagattctttgagcatggaaaaccgattcatccggcgatgagtgttcaataataaaacgtgtatctgctgtttattaattgggaatgttaaaaaatagaatggatacagattttagatgggagtatgtatgagaaactatgagagtgatgcttataggaagtatcgaagctcaatagagcagagacagaaggttgtgagaacgtcaggttctccgtattctcagcagactgcggtacaggggaaacggcaaatagcggaaaggtctgcgagtacaaaacgtaaaaggacaagagaaaaggggaaaccttattatgattatgatctgcttcttgtaattatttttctgatgtgctttgggcttgtaatgctttatagcagtagtgcctacagtgcacagaatgattataataatgatatgtttttctttacaaggcaggcaattatcggtattatcggatttcttgcaatgtttatcgtttctaagattgactatcatctgtatggtgcgtatgcaaaagaatttttttggttttcaatgtttttgatggcattggtgcagacaccacttggtaagactgtaaatggagcaagaaggtggatcaggcttcctggtggcttgtcattgcagccggcagagtttacgaagattgcggtgattctatttatagcatatgaaatctgcctcttggggcaaaaggcgaaaaaatgggatggaattaagattctgcttggttatggtcttgttgcaacactgggagtttttctattaacggataatctgagtacagcaattattgtgtttgcaattacatgtattttaatttttgttgtacatccgaagaccaaaccatttgttgctggagtaattgcagcaggaatcgtgggaatcattggaattatttttttgaaatatacacttgcagaaagtgataactttcgtatgcgccgaatcattgcatggctgaatccagaggcgaatgctgataaagacagctatcagtttttacagggattgtatgcgatcggttcgggaggcttctttggaaaaggacttggaaacagtacacagaagctgcatgcgattccggaggcacagaatgatatgattcttgcggttatctgtgaagaacttggagtgtttggtgcaattctcgttttgtgtctgtttgcctttatgctttatagattattgttcatagcgagaaatgctccagacttgtatggtgcgttgatcgcaacaggtatttttgcacatattgcactgcaggttactttaaatattgcggttgtaaccggattgatgcctactaccggagttacgcttccgtttataagctatggaggtacggcaattgtgatcttgctggccgagatgggaattgcgcttggaatttcttcgaagatccggttgaaataaattctccctcttttcaacttgactgaagtgtgttatattaatatgtagtattaaaaaccacgtaaagtaggatgggaaaatatgcgatagagcatgggaggatataagttatgagttacagagtgatcgtagatagttgcggagagttgaccctacagatgaaggagagtggaatttttaagacggcttctcttagcatggaagtggatggctttcacattccggatgacgagacatttgatcaggctgattttttaagaagagtggctgcaagcgaggaatgtccgaagtcatcctgtccatccccggagcgttatatggaattatacaaatgtgatgttgacagagtctatgcagttactttgtcaggggaattgagcggatcttataatagtgcacttcttggagagaaactttataaggaagaaggcggagaagaaaagatccatgtatttaactctcgttcagcatctgtcggagagacgttgatcggacgaaagattcaggaatgtgaagaagccggaatggattttgaacaggtggttgaaacggtagaagcttatattgaagaacagcatacgtattttgttcttgagaatcttgatacacttcgtaagaatggacgactgacaggactgaaatctctggtagtcagcgcattgaatatcaagcctgttatgggttctaccccagagggaacaatctgtcagttggataagagcagaggaatgaagaaagctttggcgaagatggcagagcatgtcgcgaaggacgctgtaaaaccggaggagaagattcttgcaattgcacattgcaactgtccggaacgtgcagaggtcgttagaaaattgattttggagaaagtaaaggtgaaagattcctttattgtagatacagcaggaattagtagtatgtatgcgaatgatggtggaattattgttgtactttaagatgtgctgtggtagaataattgctaaagacctaataggaagggagcaggcaagagatgagtcaggcgaaggtggatcgttataagaaggaaaaggcggaccgaaagaagacaatgcgtaaagagaagatcatgcgcaatgtaaaaagatgtgtagcgggagtaattgcacttgcaattgttggctggttcggatattcagcatatgatctgcattcttccaaccaggaacgtgcagttgcagaagtgaattatgactctgttaaggattatctgagtacactttcagcagaataaggttgttataattacatatagtgcaataaaaagaggttgtcgtattaagtgatacgtcctccggttataggatgtttatatttcgttatcctatatgaaggtggcatatcattgttaaagcggcaacctctttttgtgtttcttgcaacaaaacaggaagtgaacagtaacgtgaactctgaaaagaaacgaaaaagttcataaaaaggacttgaaaaaggtggaagtgtggtttacaatggagctaagtggtgagaagtggtagaatgtggtgcaatatggagaaggagtggaagcaaagggattacggtagtgatacctttagcgaacgcgaacatttccatagattccagagaaagggtttcgtatgttattaggagagtttaaccataacatagacgaaaaaggcagactgatcatcccggcaaagttaagggaagatcttggtgacagcttcgtgatctgtaacggattagagggctgtctatttgtctattcccaggaagaatggaataaattcgtagccgaactcgaaagcttaccacgaatgaacaaggatgccagaatctttaaacgctacttttttggaagtgcatctgagggcagtttcgacaagcaggggagagttcttgtcccaccgtcacttagaaagaatgcacatctggagaaggaagtagttctggtcggagtccaggatcgtgttgagatctgggacaaggcactctgggaagagaaaaaccagatcagcgaggaagatctggatgcgattgcagaacgtatggaagcgatcggaattcgcatctgatgacaacaaagaccgccaagtgaggcagtcagaaggaggagtctatggcattcgagcacgtttcagtgctgttgcatgagacagtagacggtttgaacgtaaaaccggatggcatctatgtagatgccacgttgggtggaggcggacatgcatatgaagtctgtacaaagcttggcgagcaggggagattaataggtatagaccaggacgctgatgcgattaaagcagcaggaaaacgcctggaaggtttcggggagaaggtcacaataatccggagcaattattgtgatatgaaaccgcggcttcatgagataggaattgacaaagtagatggaattacagtagatcttggagtttcttcttatcagttggatacagctgagaggggattttcatatcgggttgacgcacctcttgatatgcgtatggatcagcgtcagaagatgacagccagagacattgtcaacgactatagtgaatcggaactttatcgtgtgattcgtgattatggcgaggacagatttgctaaaaatatcgcgaagcatattgttgcagaacgcacaaaaggtccgattgagacaacaggacaattgaatgagattattagtcatgcaataccaatgaagattcagaagacgtcaggacatccgtcaaagcgtacatttcaggctcttcgaattgaattgaatcatgagcttgatgttttgcgggatacattagatgatatgatcgatctgttgaatccaggaggaagactttgcattattacatttcattcgcttgaagacagaattgtgaagagttctttccgtaagaatgagaatccgtgcatttgtccaagtcattttccggtttgtgtatgtggaaatgtatccaaagggaaagtgatcaccaggaagccaatccttccgtcagaagaggagctgacggtaaacagcagatcaaagagtgcaaagcttagaatctttgaacgtgcataatttgatatcacagggagtatttagagtataaacgaaacgttcctccgggaaggggagagcccggcggaacaagaatccagagaaaggacaggaaagcgatggcgagaaacacaggtcgcagacagcagaatagaccagcagcagactggaaccacttctatgtgtacggtagtgccgtgcgtcagccagaagctttaccgtctggaaatgggacagttcgtaagccgaagaaaaaaagaacaagccgtcaggtgattaaaaaccggcatcgtgcgcagcggatcagtcaggcatatgcgacttttctaattgtggcggcagtctgtgcggtttttatatgtgttatgtatttacgcttacaggcagatgttttgaatcgtgcagatcagatcacagcgctgcagcaggaactgacggatctgaaggaatcaaatgatactgcacatcaggcagcagaagattctgttaatcttgagagtgttcgtgaaaaggcaatgaacgagatgggaatggtttatgagtctcagggcaaagtgattcattatcaaagcccgacaagtgactatgtaaaacagtatgataacatcccggaagatggcgttttagcgcaatccaaggatgtgaaaaataaggaataatggaagatggcaggaagaaaaagaaggaagaacagatttcaatttctgactaaaaaattcccggtaagaatgcagagaaagctggtactgctgtttatagcagttatactggcttttcttgttcttgtaggaagaattacatacattaatgttacaaagggaagcaagtatacaaagcttgtactgaatcagaaaatttatgacagtaagacaattccatataaacgtggagatattctggatagaaacggtacaaagatagcgacaagtgaaagggtttataatgtgattcttgatgttgttgtaatgacagataaagaagaatatatagatcctacgattaaagtattgaataaatgtttcggaatcagtgaaaagacagtacgagagattgtagaagaaaaacctaatagcagatatgttatattgaaaaaaggaatcgattacgagacggctcagaaatataatgagataaagaatgatactgagaattatccaaatgtaaagggaatctggctggaggatgattataacagaacatacccatataatacgctggcaagcgatgtgataggctttacttattccggaaatataggagcaattggaattgagagtgcttacaatgatgttatgacggggacagatggaagagagtatggttatctggatgaagatgatacagtcgaacagaatgtaaaagcagcaaagaatgggaataatgttgttacgacaatagatattaccttacagagtattgtggaaaaatacattcaacagttcaatgaagaacatgccggagaagaaggaagtggagtgaccggtagcaagaatacagcggttatgatcatgaatccgaataccggagaaattctggctgaggcctcttaccctaattttgatttgaacaaaccaagagatttgtccagtatttattccgaagaaaaatggaatgcgatagatgagaaggatcaattgaacatattgagtagcatctggagaaatttctgtgtcagtgatgcatttgaaccggggtctacgatgaaaccattcactgttgcagccggattggagacaggaactcttaccggagaggaatcttattattgtggtggttatcttcatgtgggagataatgatatcggatgtcatcttcgttctggacatggaacagagagcacaatggatgcgattgccaattcctgtaacgttgcattgatggaaatggctgaaaaaatcggaattgataattttatcagataccagcatatttttggctttggagaatatacgggaattgaccttccggcagaagcatcaacagcaagtcttctgtatacaactgatacgatgacaccggttgatcttgcaacgaatgctttcggacaaaacttcaatgtgacaatgactcagctggcagcagggttcagttctctgatcaacggtggttattattatgaaccgcatgttgtaaagcagattcaggatgagaatggaaatgtgattgaaacgaagaatcctgtattgctccgtaagacggtttcgacagaaacatctgaattagtaaaaacatatttacaggcggtaatgcagtatggtacaggtaagagagcacaggtagaaggatatgatattggagcaaagaccggtacagcgcagaaacttccacgtaaagatgggaaatatctgctttcttatatcggatatgctccacaggagaatccggaagttgttatctatgtggtaattgatgaagcaaatgtagatgcacaggataatagttcgttggttcttgaacttgcgaagaatatcatgtcagaagcatttccgtatcttggtatcacaaccatagaagagacaggggaaagtcagacacagcagagcggtcagagctttgaagatacagagtattctgattatgatcaggactatacagatgattacagtaatgaagacggctcatatgttgatgaaaattataagccggatttggacagctgggcaacatcatccaatatagattaagtgttatagcagacaggcaaacaggaataactccgaaaaagacataatacattgtagaaatgtctttctcggagttgttttttgtgaaaaataaaacatataaccgaaaaaaagcaatggttgtttttttctgtgcagttctattgatttcagctcttttcggcagactggtttatctgatgatttttgatgctgcacactatcagaagctggcgaaagatcttcatgagcgagaaagaaaaatcaaagcggcaagaggagagattgttgacagaaatggagttgtcctggcaacgaacaggacggtatgcacaatttccgtgatccataatcagataaaagatccggagcaggtgattgcagttctctgtcaggaacttggggaagaggaagaaaacatccggaaaaaagtagaaaaagtgtcttcaatggaaaaaattaaaacgaatgttaaaaaagaaacgggggatagaatccgtaatctggatcttgcaggagtaaaagtagatgaggattttaaaagatattatccttatgatacatttgcatccagagttcttggatttacaggtggggacaaccagggaatcatcggacttgaagtaaaatatgaagaggtattaaaaggaaccgatggaaccattcttacagtgacggatgcgagaggagtcgaacttgagaaagtagcagaagacaggattgaacctgtggccgggaacacgcttcagatcagtctggatcataatattcagaagtactgtgaacaggcagcaaaaaaggttcaggaggaaaaacaggcggatagtgtatctgtattgcttatgaatccgcaggatggagagatatttgcaatggtaaatacaccggaatttaatctgaataccccttttgaattgattgatgtggatgaaaatacagaacagacggatgaacaggctcaggagatgttaaatcagatgtggcgaaatccctgtattaatgacacatatgagccgggatcaacgtttaaaatcattacagcatcagcatgtcttgaagaaggtgtcgtttctttgtcggatacattttcctgtccgggataccggattgtagaagacagaaaaatccggtgtcataaggttggtggacatggacaggaaacgtttatccaggggatacagaattcctgtaatccggtatttattgatattggtcttcggcttggagcagagaaattttatgcttattttaaacagtttggattacttagtctgacgaatattgatcttccgggtgaagcgggaacaattatgcataacgtagaagatattggtcttgtggaattggcaacgatttcatttggacagtcgttccaggtaacaccggttcaaatggcaacaacagtaagttcgctggttaatgggggatatcgggtgacaccgcattttggagtggcagttcttgaaaaagacggaacagagatacgaaagctgaaatacaaaaagaagaatgggattgtatctgaaaaaacatcggagacgatgagaatacttctgaagagtgtggtagaagaaggatctggtaaaaatggatacattgaaggatattcgatcggaggcaagactgcaacatcacagactcttccaagaagcgcaaacaagtatatttcatcatttatagggtttgcaccggcggaagatccgcaggttcttggaattgtagtgatccgtaacccacaggggatttattacggaggaacgattgcagctccggttttgcgcagcatctatgacaatgtacttccgtatctcgggattgaaaaaaactgaccaatggagtatactgtaaagtgcattttgagaatctgatgctgttcgaggattgcgggaattgcatatcaatggagcaatccggttacatcagtgagtggcaaaatttatttttgacactcacatcatctgatgacagaaaagtacataagaaggattctctgtgtaaaacaaaagaaatgaagaggtgtatatatgaacagtcatgtagtgattccggtattgattgcatttgttataagccttgtgcttggaccggtggtcattcctttcctgagaaggttaaagatgggccagacggagcgtgtggagggtgtacagtctcatttgaagaaggcaggaacaccgacaatgggaggtattatcattctggcagctgttgtgattacgtccctgttttatgtgaaagactatccaaagatcatcccggtacttttccttacagtaggattcggactgattggatttctggatgattatcttaaagttgtcatgaaacgttcagacggactttttccaatgcagaagatggcactccagattgtagtaacagcaatttttgcgttttacatcgtaaaagtagcgaagattccgcttacaatgatcgttccattctccggcggttatgaattgaatcttggatggcttgcgattccggttcttttctttgcagtaatcggtacagttaatggaacaaactttacggacggactggatggtcttgcatcaagcgtaactgttctggtggcaacatttttcacggttgtagcaattggaacgaaaagtgggattgagccgatcacttgcgcagttgtcggtgcattgatgggattccttctttttaatgtgtatccggccagtgtgttcatgggagatacaggttctcttgcactgggtggttttgttgcaggaacagcgtatatgatgcagatgccgctgtatatcattattgtcggatttatttatcttgtagaagttatttcagttattctgcaggtaacatatttcaaaaagacaggaggaaagcgtctctttaagatggcaccgatccatcatcatttcgagctttgcggatggtcagagacacgggtagtggcagtattttctattgtgacggcaattctttgcctgatcgctcttatgggggtataaaagaatggttgtaaaagataaaaatgtattagtgtttggctctggaatcagtggagaggcagcgtgtgcgctccttttgaaagaagaagcaaaggtcgtattgtatgatggtaacgataagctgaatccggaagcgatccgtgcaaagattgaaggcggggacagtgagtcactggaaatcgtccttggaacacttgagggagaaatgaaagaagaacttcttgataaactttctcttgttgtaatgagtccgggtgttccgacagatcttccaatcgtgaatgagatgcgtgagaaaggacttccaatttggggcgagattgagcttgcgtatgtctttggaaaaggtgatgttctagcaattactggaacaaacggaaagacaacgaccacttctctgcttggagaaattatgaaaaactatgcgcagagcagttttgtggtaggaaatatcggtaatccatatacgagtattgcactccagacaagagaagattctgtaattgttgctgagatgagcagctttcagctagaaacaattcagacattccgtccgagagtcagcgcgatcctgaatattactccggatcatctgaatcgccatcatacgatggaagcatacatagaggcaaaggaaaatattgcgaagaatcagacagagaaagatacttgtgttctgaattacgaagatgatgtgacaagggcatttggagaaaatataaagtcaaaggttctatatttcagcagtcagcgtatattagaagaaggaatctatctggaaaacggtcagatcgttcttgcaatgaacggagagaagacaccggtatgccatgtagatgaattgaatattcttggaacgcacaatcatgagaatgcgatggcagcagccggaatggcagcagcatatggggttccggtagatgtgatccgaagaacgctgaaagagttccagggagtcgaacatcgtattgaatatgtggcagaaaagaatggagttgtatattacaatgattccaagggaacaaacccagatgcagcaattaaggggattcaggcgatgaatcgtccgacagttctgatcggtggaggttatgataaggattctgcttatgatgaatggatcgattcctttgatggaaaagtaaaaaaattagtacttcttggtgcgacacgtgacaagatcgcagagacagccagagcacatggatttgaagatattgagatggcggatacatttgaggaagcatttgcaaaatgtgtagagaatgcaaaaccgggagatgcagtactcctttctcctgcatgtgcaagttggggaatgtttaagaattatgaagaacgtggagataagtttaaagagcttgtaaataatctgtaaagggtgaactgtattgaagcgtcctgcaaagaagcacacgtatgatgatacactgcttgtgacggtgctgattctcgtactggttggtctgatccttctgaccagtacaagtgcatataacggcagggtgaagtttcatgattcttattattatctgaaaaagcagggactggctacagttcttggaatggcaggaatgctatggatcgcgagaattgattatcacagatggattccacttgctgtgccaggatatctggctgcaatcggtttatccattgctgtcatggcattcggaaaagaatataacggatccaaaagatggttgtctttgggtccgttttcttttcagccttcagaatttgctaaagtagcagtaatcttgtttctggcctggctgatcaaccgaaatgtgaaaaaaatatcaaaacttcggataatgtccggaatgatgctttcgatccttccggttgtcggtctggtaggagcaagtaatctgagtacagcaatcattatcctcggaatcgcagttacattgatttttgttgcaagtccaagatatgcacagtttatatggatggctgtatcaggagttggatttctgggaatttttctagccttggaaagctatcggctggagcgacttgcaatctggcgcaatccggagaagtatgaaaaaggatatcagacattgcaaggactttatgcaattggaagtggaggactgtttggccgggggctgggaaacagtgtacaaaaactgggattcctgccggaagcacagaatgatatgattttttctattgtctgtgaagaattagggcttgttggtgcgggggctatcattgtactgtttctgattttaatctggagattttttgtgattgcaacacacgcaccggatctttttggtgcgttgattgcagcaggagccatggcacatatgatgattcaggtaatattgaatattgctgtcgtcacaaattctataccgaatacaggaattacacttccgtttatcagttatggtggaacgtcagttgtttttctgcttttggaaatggggcttgtccttagcatatcacgtttggtacaatagagttgcctgtatttcatacagatggagtccgggtatggaaaacatgaacagaggaaggaatctgatcaatgaaaaaaaagaagaaaaagaagagagggatgttccgctttattgtagtattactgttgcttgtaatatttgttctactctttcagacacgcagtataaaggtgaagggaaatgaatattacggagagaattcaatcatcagctggctcaagaaagataaactctccatgaatacggtgtatttattctggaaatataattatacagatgcagaagttccgtcagttgtggaagaaatgaaattgacatttgaaaatccatggacgcttgttgcgcatgtgaaagagaaaggaaaatccggttatgtttctttcaatgatacaaatttatattttgaccggaaggggacagcactttttgaaagcaagaaaacttttacaggagtaccttatgtggaaggactttctttcgatgcatcgaaagtagagatcggaaaaaagattccggtggaagatgacagtgcattcactttgatcgcagaggcttcaaagtatctggtgaaatattcacttacaccggataaactggtatatgccaatgaacagagtgtggtattatattttggatcagtagaagttttaattgggaataaagaatatgagatcagaattgcacagatcaaaccgattcttgagaagctgaaggaacagtatccggatcaggcgggggtgcttcatcttgagaattatgaagcagattcagcatcaattaactttacaccgcagtcttgaagctgaattgttggaaaaaaaccaaaaataagaaaaaatctattgattatttacggaaaagactttattatatacttattgaattgtatcgttcaattaaaataagggatgtatataagaattaataagacgacaaaggaggaactactcttgttagaaattaaaaccaacgaatctgaagcggctgcaagaattattgttgtcggagtcggcggaggcggtaacaatgccgtgaaccgaatgatcgacgaacagattgcaggcgtagaattcatagctgtgaatacagataaacaggcattacagctgtgtaaagcaccgacacttatgcagatcggtgaaaaactgacaaaaggacttggtgctggtgcacagcctgagatgggagagaaggcagcagaagaaagcgctgaggagatccaggctgcattaaaaggtgcagatatggtatttgttacttgcggtatgggaggcggaactggaacaggtgctgctccggttatcgcaagaattgcgaaagagcagggcgctctgacagtaggagttgtcacaaagcctttccgtttcgaatccaagacaagaatgcagaatgcaatcaatggtattgataaattaaaggagaacgttgatacaatcatcgttatcccgaatgacaaactgcttgaagttgtagacagacgtactactatgccggaagctttgaaaaaggctgatgaggttcttcagcagggtattcagggtatcacagacctgatcaatgtaccatctctgatcaaccttgactttgctgatatccagacagttatgaaggataaaggtattgcacatatcggtattggtgcaggacgcggagatgacaaggcactcgaagcagttaagcaggctgttgccagtccactgcttgagacaacaatcacaggtgcatctaatgttatcgttaatgtatcaggagacattacacttatggatgcttctgatgcagctgattatgtacaggagcttgcaggagaaagtgcaagtatcatcttcggtgctatgtatgatgatacaaagtctgatgaatgtacaatcacagttattgctacaggcttacataatgtaggcggaagtgcatccaagctgaaagcaagactggaaggacagcagaagacaagttctattcttccgaatggtgtagaaagtcatgcaagaccatcttatgactatacagcacaaagaacagctcagacatcaacagtaagaccgcagggtggaacaatgccaacactgcagccaagatcaacaactggtggagtaagagagcagtctattaagattccggatttctttaagaaataattgaattgaaaaatgatgaaacggtctgaagtatcaggccgtttttcttttatgtcgaaggatgtcagaaattcttctattttctttctgttttactgtcagtatctgacaaaatttccaaagagcaaattttataattctatatgatatcgaggatgactcgaaatgaaaaggaaggtggaagatgcactatgagttgtacatagatcttttttttctggaaaatttcatgatggatagcctgttacttttcgtgacagaacggattacgggtggaaaatatagttttaaaggagttttatccggagcattccttggaagtgtgttgacatgtctgatggtggttgtatctgttcccgcctggatgaaaaacatagccttttatctggtgattccattttgtatgctttggttaaaaaataggaaacaatgtatgctccagatactcaaaggaatgggattgctttacctttttggaatgttcctggggggcacgttgatgatgtttcgtccttatctgcattatatcagtctgttttatgggattgcggtgcttagctcacaggggattctgatggcctggaagttcttgaaaattcttaagatagagcaggaacggtgctgtgaagtgattttatttacagaagcagatagttataaggttcatgcattgagggatacgggaaactgcctgacagatccactcagtggtgaaggggtgcatgtactggattgtaatttttatcatcaggtaatgaaagaagcaatggaattcaggtatattccatatcgaagtgttcatggtagtggcattatgaaaattttccggatcaggaaaatgtgtgtggaaataaatgaaaaagaatggatagaatctccgttgatcggtgtgagcgaatcaccgatcagtggagaggaagattatcaattgatattgaactgcaaggtgcagatgttgtgaatgaaaaactgtgccgcaacagaagatgtaagaaagaaaccaggaggaatttatatgatggttaaagtggctgtgccggagaaatttaaattaaggattgtaccaaatgtcaggacggttttatttggtggccaacaggagattcattacataggaggcagtgaggttcttcctccaccattggaaaatgaaaaagaacgtgaggtggtaaggtggcttggaacagatcgagatgaaaaggcgagaaagatactgattgaacataatttgcgtctggttgtttatatagcaaagaagtttgataatacaggagtaggtgtagaagatttgatttctattggtactatcggtctgatcaaagcaatcaatacatttaatccatcaaagaaaattaaactggcaacatatgcttcacgttgtattgagaatgagattttgatgtatttgagacgaaacagtaagacgaagatggaagtttccattgacgaacctttaaatgtagattgggatggaaatgaactgcttctatctgatattcttgggacagaagaagatacaatttatcgggatctggaggatgaggcagaaagaaagattctgtttcgtgccttgaataaactgtcaggaagagagaaattaatcgttcgtatgaggtttggactggatcatccggagggaaaagaaatgacgcagaaggaggttgcggatcaacttggaatctctcagtcttatatatcaagactggaaaagaaaattatgcacagacttcggatggaaatggtccggtatgaataacagttacaaaaatttaataaaaagaaagatgtacaatttcccgtatggtgttaaaataaaagaaaaagtatctgaagcttaaaaagaaaagatacaggacagaaagggttgaggatgtatgaaattaacatttgtaggtgcagcccatgaggttacgggaagctgtcattttctgcaagtagcaggaaagaatgttttggttgactgcggtatggaacagggaccggatctgtatgagaatccgggacttccgatcagtgcaacagaagtggattatgtattcctcacacatgcacatattgatcattccggaatgttgccaaagcttgtaaaggatgggtttaaagggcagattttcactacctatgcgacagcggatttgtgtgatatcatgcttcgtgacagtgcgcatattcaggaatttgaggcagagtggaggaatcgaaaaggcaggagagcaggaaagccggagtatgaaccggtttatgagatgcaggatgcacttaatgcgattgaattgcttgtgccttgtcagtatggggagcgcattacaatctgtgaggggatccagatccggtttacagatgtaggacatctgcttggatcagcaagtattgaagtctgggcaacagaagacggagtgacaaagaagattgtattttccggagatattggaaatctggatcagccgattattaaagacccggcttatacagagagtgcggactatattgtgatggagtctacgtatggcaaccggctgcatacgcaggaaaaaccggattatctgggagattttacaagaatcctgaaagagacatttgataaagggggaaatgttgttattccttcctttgctgtgggcagaactcaggaactcctttattttatacgtgagatcaaagaaaaggaattattaaaagaatatcagaatttcgaagtatatctggacagtccgcttgcaattgaggcaacgaagatatttacaaaaaatatgagagagtgttttgatgaggatgcacttgcacttgttaatgcagggattaatccacttatatttgatggacttaagactgcaacaacaagtgatgattctaagatgatcaattttatcgagaaaccaaaggtgatcatctcagcttccggaatgtgcgatgctggtcgtatccgtcaccatctgaagcataatttgtggagagaagagtgtacgattctttttgttgggtatcaggcaatgggcactttaggacgcagactgatcgagggcgaaaagaatgtgaagctgttcggtgagccgattgaagttaaggcaagaattgagagccttcatggaattagtggtcatgcggatatgaatggactcttaaaatggctgggagcgtttaaagaggcgccacaacgcgtctttgttgtgcatggtgaagatactgtaacagaagagtttgcaaagacggtggaagaaaagtttggatatcaggcttatgcaccgtttccgtgtagtgaagcagacctcttgacaaatgagatcttaagtgaaggtgtaaagattccggtgaaggcgaaaaaaccggcacagcgtaaagcggatgcggcgtttgaacgtcttgttgcagcaggaaagcgtttacttgatgttatttacaagaacgaaggtctcgcgaataaagacaaagcaaaattcgagtcgcagattaataatttgtcggataaatgggatatttgattgtcaaggactaaaactttataaaattcagcacttcatggaatatcttattcaaagagtgagaatgattctaagtagaaaaaaacttaggaggtttcttacaatggttgtgaataaggtagaactgtgtggagtgaatacatcaaagctcccacttctcagggaaaaggagaaggaggagctttttcgcaggattcgtcagggggacaagttggcgcgggaagaatacatcaaaggaaatcttcggctggtgcttagtgtgatgaaacggtttgacagcagtaatgaaaatgcagatgatttgtttcagattggatgtgtggggcttgtaaaggccgtagataattttgatccagatcgccaggtgaagttttctacctacgcagttcctatgatcataggagaaatccgccggtatctgcgagataacagttcccttcgcgtgagccgctcattgcgtgatatagcttataaagtaatttatacaagagaaggttatattcgaaaaaatatgaaagaacccagcattcaggaaatcgcagaagagattggactttcaaaagaagaagtagtttatgcactggatgcagtacagacaccaatgagtcttcaggaaccggtgtataatgatggtggcgatgcactgtatgtgatggatcaggtcagtgataagaagaacagagaagaaaactgggtggaagagttgtctttagaagctgcgatggaacggctgaatgaaagagagagacggctgatccgtttacgattttttgaaggaaagacgcagatggaagtttcggaacagattggaatttcgcaggcacaggtgagccgtttagagaaaaatgctttaaaaacaatgagacaatatcttcttggaaaatagagagaaagtattgaaatttttatgacttcatactatgataaatgggaagaaaatgttacagaaagtaacagaaaagagcagatatggttatggtgtaatgtaaccaatgataaagtatggaggcagctatgataaaggcttgtatttttgatctggatggaacgttgacaaacacattggattcactggaatattcagtcaatgagacgatgaaagagattggaatgccacagatcacaaaggaacagtgccggcagttcgttggagatggggcgaaggttctgcttgaacggacattaaaggcaggcggggatacacaactgtgtcatcttgaagaggcggtggaagcgtatgccaggatatttgatgcaaattgtatgtacaaggttgctccgtacgaaggaattccacagatgttgcagcagttgaaagagagtggtatcaaacttgcagttttatcaaataagccagacagacaggccgttcatgtggttgaagaagtatttggaaaagaactttttgaccatatacaggggcagaaggatggagttcctaagaaaccggatccgacggccgcgttgacgattgtcagttcatttggggttttgccggaagaagcagcatacatcggagattcagaagtggatcttgcaacgggtcatgcggcaaagatgcagacaattcttgtgtcctggggattccgtggaagaaaagctcttttagaggacggagctgaatgtattgttgattcagcggaagagatacgaaagattgttaagaaacaggaggagaagtaatgggagagtacaatgaagagtgtctgaagacttttttggagaagcaggagcagctttttgatgaaccggtagcagagacccttgaggcagcagaagcttttctggaggactgtatggcagttgttgtagaatctctggctgaagtaagagaatactttgaagagaatggcatggatgtagacgggatgtcagaggaagaattggaagaggcttctgaagtgtttgcactgccggatggtacttatctgatcgtagaaggataagcagaattaaaatagcagtgattgtgaaaaagcgatcaaaaagccacagataggatggactgtggcttttttgctgtacaaacccggcaagtggcattttttgagtgtttatgaagaagtgttagtttcagcaatgcaacattgaggatcggattcaggagacggttcttttggatggaacataagaatcagaagaagaatcaaaagaatgccaagagcagcaaaaataatagtatagatgatctctttcatatgaaggacaatgattttagtttttgatttcatgagtatccccctttttatacaatttatgaatttacagagcaaatatgcatgacaaatattcacacatgcggtaaaataaagattgctgtttgcaagaggaagttatatgacaacaagcccgtgttgcttacagtgggaagaagaggatggagaacacatttaggaaaggaagaagaagatgtatattatagcaggattaggtaatccgacgaaagaatacgaaggaacaagacacaatgtcggatttgatgttatagatcgactttctgagagatataatatagatgtaactatggagaagcatcgagctttgattggaaagggtatgattgcaggacagaaggtgattttggtaaaaccgcagacttatatgaaccttagtggcgagagtatccgaagtgtgattgactattataaagtggatcctgagaaggaactgatcgtgatttatgatgatatcagtcttggtgtaggacaattaagaattcgtgcaaaaggcagtgcaggtgggcataatggaataaaaaatattattgcacatcttggcggacaggtttttcctagaataaaagtaggagttggagaaaaaccaccgaagtatgatcttgcagattatgttttaggacatttttctaaggcggaacaggaactgatgagcgaaggttatgataatgcggtaaaagtggtggaactgatcgtgagtgaccagataagcgaagcgatgaacgaatataatcgtaaaaagaaggacgagtagagatgcaggcttttttagaaccattaaaagaactggctgattatcaggagattgtcagttcgagaagaaagaaaacgggtttcctgcaaatcgcaggatgtgtgaattcacagaagatacatcttgcgaaagcactgagcgatggctttgagtacagagtcatcgttttttccagtgaagaaaaagcaaaacaggcttatgaagaatggcgtgtactggaggaaaatgtatggttttatccggcaagagatcttttgttttatcatgcagatattaagggcgcatttttgacagggaaacgtatggaagtattgcgtgcgattgtagagaagaaaggacgggaagcaattactgtagttacaacaatggacgcatttctggatgggcttccatcgaaagaagaactgtgcgggaacaggattaagattcatgcagaagaggcgttggattttcagaaattacaggaaaacctttcgatattaggatatgaaagggaaaaccaggttgaaagtccgggacaatttgcagtcagaggtgggattctggatgtatttccactgacagaggagaatccggttcgaattgaattatggggagacgaagttgattctattagaagttttgatgtggaaagtcagaggtcgacagagaatttacaggaaatagaaatctatccggcaactgagaactggaagcagatggaaacggaaagctttttggcatattttccggtaaaggagacaatcttgtttttggatgaaccggtacgtcttcaagaatctgcagaaatcgtggaaaaagagtattttcacagcttggagagcagagaagaagccggtatggagacagatgagattccgattcaggtggaacagacagatcatacgattggaaagatgaacaagtattatggaattgcatttaccatgttggaatcaaaatgtggaatgtttaaagtaaggtctgtctacagtctgcaggttaaaactgtcaatccgtataatagcagttttgagctcctgacacgagatctgaagaaactgaaaagaacagggtatcgtgtgattcttgtttcgggttcaagaacaagagcaaaacgtcttgcagaagatctgagagattatgacctgagcagtttttatagtgaagagatggaacggcaggtgaatccgggagagattatggtaacctgtggttacattgcagagggatacgaatacccgatgttaaagtttacggtcatctcggaatctgatatttttggtaagaaaaagaaaaaaaagaaaagaaaaacttatgaaggaaaaaaaatccaggaatttgccgaacttaaaccgggagactatgtggtacatgagaatcacggacttggaatttatcagggaattgagaaagtcgaagtagatactgttactcgagattatatgaaaatttcctatgcggacggaggaattctctatataccggcaacacagatggatctgatccagaaatacgcaggagcagatacaaagccaccaaaattgaataagcttgggacacctcagtggaaaaaaacaaaaggacaggtaaaaaaagcggttcagttaatcgcaaaagatcttgtaaaactctacgcaacgcgccagcagacagaaggttatgtttatggaccggatacggtctggcagagagagtttgaggagatgtttccatttgaagagacagaggatcagcttcgtgcaattgaagatacaaagaaagatatggaaagtacgaagattatggatcgtctgatctgcggagatgtagggtatggtaagactgaaattgcgataagagcagcttttaaggcagtgcaggaaggaaaacaggttgtttatcttgtacctacaacgattcttgcgcagcaacactataatacatttattcaaaggtttaaagattttccggtgcgtgttgacttgatgagtcgttttcggacgcaggcgcagcagaaaaaaacagtagaggatttgaaaaaaggtctggttgatatcgtgatcggaacacacagagtgctttcaaaggatgttggatataaagatttaggacttctgatcatagatgaagaacaacgttttggtgtgacgcataaggaaaaaattaaaaaattaagagaaaatatagatgtgttgacgctgacagcaacgccaatcccaagaacacttcatatgagtttaatcggaattcgcgatatgagtgtgcttgaggaagcaccgatggatcgtatgccaatacagacgtatgtaatggaatacaatgatgagatggttcgtgaggctattgagcgtgaacttgccagaggtggacaggtctattatgtttataacagagtagaaaatattgcagatctagcacttcgtgtgcagaaactggtgccggatgcaagggtatcttacgcacatggacagatgaatgaacatcagttggaagatattatgtatgattttatcaatggtgatattgatgtgcttgtatcgacaacaattattgaaacaggactggacattgcgaatgctaatacgatgattatacaagatgcagatagatttggactgtcacagttatatcagttgcgaggaagagttgggagatccaatcgaatggcatatgcatttctgctgtatcagagggataagatgcttaaagaagttgcagagaagaggctggctgcaattcgtgaatttacagatcttggatcgggattcaagatcgcaatgcgtgatcttgagatccgaggtgcgggaaatcttctaggagagtcgcaaagtggtcatatggcagcagttggatatgacttgtactgcaagatgcttaatgaggctgtcagtcagttgaaaggtaaaaaagaagaagcagactacgctacaacgattgatcttgatatagatgcatttattccggaatcttacattaaaaacgagtatcaaaaattggatatttataagagaattgccacaattgaaacagaagaagagatggatgatatgacagaagaactgattgatcgttttggagatcttccgaaaaaagtacagcagcttcttcatattgcagcacttaagagtcttgcgcattctgcatatattacagcgatagaacaaaagggaaaagactacaaatttatcttatatgaaaaagcaaatctggatccggcaaaaattccggcacttttaaagaaatatggaaataatatgactttcaaagcagaagcagtcccgtatttcctttatcaaaagaaagggagaagcggaaaagagaaaggggaaaatgttctgcagatgctaagagaaattatagagagtattcgcgaacttcgattagatcagggaagttgaggagattctgtgtttggggttgtgatagaacaaaaaacacgatataatgagcggtagtatggctgcgtaagtaaatacgtaaaaagaggaggatttaccagatggtacgtttggcaaaaaggctggcagtgcttgcagtggcaggcacattgacagcaacatctttgacaggatgcggaacaataaatacagatgagacagttgcaacagtcggtgatgagaagattacacttggagtcgcgaatttttacgcaagattgcagcaggctcagtatgaaacctactatgcgagtatgatgggaacaacagcagaagagatgtgggcaaaggaagtgtcagacaatcagacatatgaggagcagacaaagaagagtattcttgagaatctggagaatatgtatcttgtttcacagcatgcatctgactatgatgttgcactgacagaggaagagcagcaggcgattaaagatgcagcagcaaaattcggtgaagataattcggatgatgtgaagaaagtggtatcaggagatgaggaggaagtggctaaagttctcgaactgatgacaatttcgaataagatggaaacggcaatggaagctggtgtggatgagaatgtatcagatgaagatgcagcacagaagagtatgcaatatctcttattctcatatacaacaacagatgattcgggagaatcccagacattatcagatgatgagaaagaagctttgaagacgaccgcacaggcatttgatgatcggttaaagggtggagaagatatggagactgttgcatcagcagcaggacttacagcccagacagctacatttgattctgaaagtacaagcccggataaggatctgattgcagcagcagatgcattgacaaatgaaggcgatgttacagatattatagagacagagaatggaatttatattgcaaagcttacaagtcttttggacagagaggcaacagacagtaaaaaagaaagtattgtaagtgagagaaaacaggaacagtatgattcacttctggagcagtggaaaaaggatacaaaaatcaaagaagagaaaaaagtatggaagaagatcagttttgaaaaacagggtgtaacaattaaaacgtcagatacatcagatacttcagacagccagaattaaaaaaacagggacaaaaactttgtgaagaccaacaagtttttgtccctgttatatttacacgagcaacgagccaaagtccgtgctttcacgaaaaattaaatgtattccagtttttcgaaataatgcattaagatatcagcacagttttcaacaccaagttcggaagtgtcaagaatcatatgataatcattcacatctccccaggtcttgccggtgtgttcataataataagcagcacgctcttcatccgtatgctccaccttttcttttgcggcatcatgatcaagattttcttttttcatgattctctgaatgcggtcctctttggcagcactcacatagatgtttaatacattcatccggtctttcagaatatctgaggcgcatcgtccgagaataatgcaagggttttcagccagtttccggattgcttcagcttcactttcatatttgtgatcagagagcttttcttctatataggccttgtcatagaccggaatatcaagtcgtttcgaaagctcttcagcaataatgctggctccggtaccgaaacgacgactcatagtaattactaatttcataatgaagtcctcctttgtagaaataacattcagatgaattttattatagcacgttctgtttgatttgtctcggttttacttacttgtatccaatgataggaagctactgataaaaatgtatccattttttcaaaagaaataaaggaggaatttcaatgaaaaaatggatgtaaaactttatacaatcacccattgcaagatcatgtatactaatgatataatttatagtagcgtttttggcagttgccagaagcaaacttatggatgattaaaaatttgagtaggtgacggatttgaagaataagatcaaacgttttgcaaagggggattttcacatcccgcagccggaaattatttttcctgagactcacattacgatgcgtgtcggagaaggagaaaaatatgagggaagcttttctctgcagaatgaaggggaagggacaatacgtggacttgtatatccttcttcctatcgtgtacagtgcgtagagcagggttttgatggaaatccggtaaatatttattatacatacgatggaagaggacttgtgccgggacatgttgaacatgggaaatttacgattgtatgtaatggtggagagtatgatattgcatttactgcaattattgagaaaccatttgttatgactcgatacggaaaggttcagagcctggaagattttaagaagcttacatatcgtgatgcagctgaggcagtgaagttattccggtccagagatttctttgagattctcaaatatgaagatacgaggatcaaggcgctttataataatatgcgtaaatgggaactggatcagcacgcccttgaagaattcctggtagggtgcaagcagaaagagaagatttttcttacattggaagaagaaagccgtgcttttatttctcttgtagaagacagaaaagagacttttactgtgaagaaaaatacctggggatatctggaggttgatgtaagaacagaaggcgatttcctttctgttgagcacagacatctgacgacagacgaatttataggtaatgcctatcgtctggaatatggtatttctatggacaagcttcacagaggaagtaactttggaaggatcattctggaaacgccatatgaaacattgagttatgaggtcgtagtggaaaaggatatttgcagagatgaggaacatcgtgcaaatgaaaaagaatttaatggaattctgaaagattatctgaaatatgaaggtgacaagatgtcactggaagattggacagaggcttctataaagaaaatttcacatcttcgcgaggtagatgaacgtaatgaattttaccttcttgcccaggcacatatctgcattttgggtaatcggatggatgaggcaaaatggcttttagaatcttataactacaatcgttttgcaatcggtaaggatgttgaattgagttcctattacctttatttgacgacaaaactgagtaatgattcgattgggcagagaagggtcgcagaagaactttcacgttcttttatgaagcatccggacagctggcggattctttgtatgctgattgaggttgattcagaatataaaatctacagtgaaagactgaatgtgcttgagaagcagtttatggagtataagtctcacagcttatggttctatcttcaggcattccgttgttttaaagagaagagctcatctcttaaaaaactcggacagtttgaagtacaggttctgctttttggcgtgaaatataaactgatgacgaaggaacttgcattatatacagcaaacctggcaagtcagatgaagaattttgataaacatctgtataatgtacttgtgaagtgttatgagatgtatgatgaagcgatgatattgacttctatctgtacattgcttataaaaggcagcagaacagaacacatctatttccattggtatgagaaagcggtagacgcagagctgaagattgcgcagctttacgaatattatatggcggctgcgagaccggaagaatttcataagcagcttcctcgttcggtatatttgtattttatgcatggaaattctctggattataagaaatgcgcatttttgtatgcaaatcttattacttatgaagatgagacaagcgagatttatgcgcactacagggatgagatggaagaattcacatggaatcagctggagaagagaaatatagatgaagatctgcggatcatttataagcgattccttgtagagacagacatgagtcaggacagaatccgcgctctttatgatgtgtgtcacgcatattggattacaacaaaggttccgaatatgaaatttattcatgtaatcgcagctgatggaacaattacacagaaggcagcatatacagagaatggagccagagtatttctgtatgcaaagacggatcgcattgtatgggaagcaaaagatggaagacattatacagattctatcccatatgagagtaaacgtctgttttatgaacttagatatatggatatctgcagaaaatatgcaaatagcctgaaccgaagcaaagcgtttgaagaagaggaagagctgacactggaaatcgtaaaggaaaagggtctggaaaatttcccggaggatgagatccaggcactgtgcagcaagatgattcgtgagacaaattatgagaatgatgatttcctgacctatgtttgttatgatttatttaagaaaaaacagtatgataaagtgattcttacgtatttggcaaacttctactgtggagcaacacaggagatgaaggaattgtggaaagttgccagagagtatgaagtccatacgcataaactggcagaacggatcattacacagatgctcttttcagaggaattattccaggagacaaaagtatttgaagcttattatgatgaaggtgcatacttccggctccagcaggcttatctggcatatgtctccagagaatatgttgtagaagcacgtaggatagagaaatctataattgatattatctgcagggaagcagagaagggtgaggcaacaatcgatatttgtatgattgctgttttgaaatattattcgaatcaagagtatgaaacaagccttaagaagacgctgaaaaagtttatgcaggaactttgtggcaaacagatttatttcccatttttccttaagtatgataaggagtggctgattgaattccagttgtgggataagacactggtagaatacaagggccagaaggatagccgtgttatgttgtattatcagttgcagaaaggtggaaacggagattctgattatgcaacagaacttctgacaccaatgtatgagaatttgtatgtgaagaagtttgtgttgttctcgcatgaacgattgatctattattttaaagaaacaattgacggaaattcttacagaagtgagaaagagatctgccagcatacggttgaaaaaggtgaaccgggcagatatggaaggctcaatgacattattctggaagaagatccggaagaacgagagaagaagatgaagcagtatgcactggaagatgcggttgcatcacatatgtttatacagtattaaggaggaaatcttttcatgggacagggaagtataattggatatgagataaatgaaaagacatgccagatcagtttttataatgataaagagatggaacctcagacactggaagttgactcagataattttcagattcctttgattattggaaaactaagagacacatgggcatatggaaaagaggcaaaacgtcttgcaacactgaaagaaggatttaccgttgcccgtctgctttcgagaagtcttgcaaatgagaaaattgaatttggtgatgagacatatgatgcagtatggctgctttcacagtttatccagatgtctttacagtcatttcctaaaattgatggaattgtgttcagtgtaccggttcttacagaagaactggcacagatgcttcgaaggatcgcagttcgcatgaatattgataaaagacatatctttattcaggattataaagagagtttttgtaattatctcttctatcagccgaaagaactgtggcagtatgatgcagcattgttctgctgtgaccgtaatgagatcaaagcatatatgctgcgcagactgaagccgggacttggtggtggaaagactacatttgttacggttgatgaagttgcaaatgcacatatgaaagaactggcgcttgtttatccggttttgaacgaggacaaagcaaaagaagccgatgcgatgttctgtaaatttatacagagcgtgtttgataagaggattgtttcttctgtattcctgacaggagaagggttcgaaaataactggtatccgaagtcattgcgggtgctttgcaatggaagaagagcatttatcggaaataatctgtacagcaaaggagcttgctatactgcatacagaaaactgtatatgcatatagagaatccggtttatctatcggagactaagctgacagatcagattacagtcaatatgcgtgtggatggtcaggaaatgtggtatccgcttgtttcctggggtgcacactggtatgagtcgaataatcagtgggaagtgatccttgaagagggtgatgatatagaattccatatcgagtcactggttcagggaacggttaagacagaaaaaatctctttggagagacttccaaagcgagcagagtactctacaagacttcagatagaaacgatgtttcaggatgaaaaaacctgcaagattacagtacgtgatgtcggatttggagatttcttcctgccgacggatttccgtgaggaaaaggtgatacatttaggaggtaatgatgggaaatttaattctttgtcatgacagacacgcagcacatccttatgagatttccaggatccactgcaggatctttacaatagaagaattgtgttactatctgtgtaataatttatatctgatcgattatacgatcatgaatgaaccgctttgcacctggttggaagaagagatcgggatgaaagaactggcagagcagcttcgagatttgatgcgtatgcgtggatctgtcgagaactttgttcttacaatcttgaaagcttcaaagatctataaagaatctgagatgatccgtatccagaatgttttggaacatttgaaaaatcagaaggatgtagagcgtaagaagtataaaggcgataatcttcttgaaagcggtgagattgaagaagcaatcatcgtttatcaggaaatcctgaatcaggaaaaagatgagagtgtagatgaaaaattctatggaaagatctatgcatgtcttggagctgcatatggacgattgttcctttatcaggaagcggccaaaatgtatgacagagcctaccagatctgcgaagataaggaattactaaaaccatatctgtatgcgtcttataagtatatgtcgctggaagaatttcacattttgcttacaaagcacagtgaatatcaggaagtgaatgcacagatgagaagcgaaatggacgaagtgaagcagaatcttcagattgagccaaatgaagtacttttggagaagtggaagaggaaacatagaagaaatcatacataatacagactttttgtgcagctgttcacagaatctatgagcagctgcattgtttactgttcacacgatgtgcgaccagcaacgcatctcgccattttaaatcgcctttggcgatggggcgagatgcattcaagtcaaaacgcgcatcctccgtgtcaatcagcggagtgattgacacgggagtgaacagtaacctgcattgttctgtaccttttggttattgtttttggggtttgacatatattgtatgctatggtagaatacaacggtaactttaccgtagtacagtgactcattggtagagaataaaagccaaactcaatgatggagggtgttattatgaaaagaaaagtattaagtgtgttattgtgtgcaggacttgcagtttctatgttagcaggatgtggttcagactcttctaatgcgaataagaaagcggaatcaacagggagtgatcttgaatatgtgaaagacaaagggacactcgtggtcggtgttactgattttgaaccaatggattataaagatgataatggtgagtgggtcggatttgatgcagacatggcgaaagcatttgcagagagtatcggagttgaggcagaatttgtagagattgactgggataataaagagcttgagcttgatggaaagtcaatcgactgcgtatggaatggtatgacactgattgatgaagtgaagagttctatggaatgcacagatgcttatatgaataacgcgcaggttgtagttgtaccggctgacaaagcagataagtatcaggatgaggaaagtgtgaaagatttaacttttgcagtagaagcaggaagtgcaggggaagatcaggttgaaagaattggtgcacagtatacagccgtttcatcacaggcagatgcactgatggaggttgcttccggaaactcagatgcagctgcaattgatgctttgatggcagcagctatgatcggagaaggaacaggttatgcagatcttacttacacaataagtctgaacaatgaggagtatggtgttggattccgtaaaggatctgatcttgcagcagctctgaatgattactttaaaaagagtatggaagatggatcaatgaagaaatgtgctgagacttataaagtacaggctgcattgatcgaaaaataaatttaggatggagctttaatataatggaacttattatggaacaatttccaatcgttattcactcactgaatgtgggattcttacagacgctgaagctgttttttgcaacgcttcttggggctattccgttaggactggttattgcatttggatcgatgtcacattttaaaccgttgagttatattacgaatatcattgtctggatcgtgcgaggcacaccgcttatgatccagatgctgatcatttattatttcccgggactggtcttaggaaacccaatctggggtggcggtgaaagcggaagatttctcgcagcttcggttgcatttatctttaactatgcatgctatttctcggtaatttaccgcggaggaatccagggtatcccacagggacaggcggaggccggacttgttcttggaatgacaaagcatcagatcttctttaaggttaagctgcttcagatggtgaagagaattgttccaccgatgtcaaatgagatcattacgcttgtaaaagatacttctcttgcacgaatcattgcactgcaggagattatctgggcaggacaggcgttcctgaaaggttctcagggaatctcaggtgcgatctggccgatgttctttacagctttttattatctgatcttcaatggtattctgacagtccttcttggaaagcttgagaagaagctggaatattttaattaaatggggaggaagagataaatggcaatacttgaagtagaacatattaataaaacatttggacggacagaagtattgaaagatatcagcttttcgttggaacgtggacaggtactttccttgatcggttcctcgggaagtggaaagacgacacttctgcgctgcctgaattttctggagacaccggataaaggtgtgatccgtgtaaatgatgaattattgtttgatgctgcaaatcctgtaacaaaacaggaaagtgagatccgtaagaaaagattacattttggacttgtattccagtcttttaatctgttcccgcagtatacagcacttgggaatgtaatgctggcgaaggaactacttgcaaaaagtcagcctgattataaggcgcgcaagaaagagatacacgcagagattgaagcagaagcaaagcgcctcttagatcagatgggactttcagagcgtatgaataactatccgcatcaactttccggaggacagtgtcagcgtgtggcaattgcccgtgcacttgcactcagtccggatattctatgctttgacgagccgacttcggcgcttgatccggagcttacaggtgaagtactgaaagttatcaaaggacttgcagatcagaatactacgatgatcatcgtaacgcatgagatggcatttgcaagagacgtatcggacaaagttctgtttatggatgacggtaagatacttgagcagggaactcctgaggaagtgtttgagaatccaaaagaagagcgtacccgtcaatttttgtctcgttatacaaatggatagtgattttgtaaatactggacaaaaaatgaaggcggtaataagatacgaagaataaaaacgacgaatatattagaaatactaatatattggacgtgaataaaataatgagcaggaagaaatacaaggcggagggaatgttgattttcactccgccttatattataatcggttttgtatgatacagaaatcatgataaaaactagcaggaactaggtaaggagcataaactgacatgagtgaatttgaaaaagcagtgacgggacttggggaagaatgcggtgtttttggtgcttatgatgtggatgggcatgatgtggctgcatcagtctattatggcttgtttgctctgcagcatagaggtcaggagagctgcggtattgcagtgacagacacttatgggaagagaaacgtcctttcaaaaaaaggacttggccatgtggatgacgtgtttgatgaagagggcctttcagagctgaaaggaaatcttggtgtgggccatgtaagatattcaacagcaggcgcaacacgtgtagagaatgcaatgccacttgttataaactatgtaaagggaacacttgcgattgcacataacggaaatttagtaaatgcaatcgagctgagagaagaactcagccagacaggtgctattttccagacaacaatagattctgaagtaatcgcatatcttattgcgagagagcgtcttcatacaccgacagcagaagaagcagtgaagcgtgcgatgcagaagatcaagggtgcatacgcacttgttgttagcagcccgagaaaaatgattggtgcaagagatccatttggactcaagccactgtgcatcggaaaacgtgacaatacatatttccttgcttctgagagctgtgcaattgcagctgtagacggtgagtttgtaagagatgttcttccgggagaaatcgtaacaattacaagaaaatatggaatccagtcagatacgagtatggtgatcgattcggaaaaacaggcaagatgtatttttgagtatatttattttgcaagaacagacagtacaatcgatggtgtaggtgtataccattccagaattctggcaggaaaagcacttgcggaatcttatccggtagacgctgatcttgttgtaggagttccggactccggtctggtagcagcgaaaggatattctgagcagtcaggaattccgtatggaatggcatttcacaagaatagctatgtgggaagaacatttatcaaaccgaaacaaagcgaacgtgtttccagtgtaaaaatcaaactgaatgtgattccggaagttgtaaagggaaaacgaatcgtaatggtagatgattccatcgtgcgtggaacaacttgtgcaaatatcattaagatgctgaaaaaagccggagcaaaagaggtacatgtacgtatcagttctccaccgttcttacatccatgcttctttggaacggatgttccgtcaaatgagcagctgatcgcacatactcacacacaggaggagatccgtcagctgattggagcagactctcttggatacatggagattgagaaactaaaagacatggttggagatcttaagtattgcgatgcctgctttacaggaaagtatccgatggaagttccgaaagaggatatcagtcaggcatttgaacaaaattgattttgaagactcagtttatgtgttataatagatgaacagttacgataaagattgaaacaaggagaaaagaattatgagtaatgatcgttatgtaagcccgctttcagagcgttatgcaagccgcgagatgcagtatatcttctcaccggacaaaaagttcagaacatggagaagactttggatcgcactggcagagactgagaaggagcttggactcaacatcacggatgagcagattgaagagatgaagagccatgcggatgatattaactttgaggtggcaaaggaacgtgagaaggttgtacgtcatgatgttatgtctcatgtttatgcatatggtgttcagtgtccgaaagcaaaaggaatcatccatcttggagctacatcctgttatgtaggagataatacagatattattattatggcagaagcactgaaactggttcgcacaaagcttgtgaatgtaattgcagagcttgcgaagtttgcagaggagcagaagaaccagcctacacttgcttttacacatttccagccggcacagccgacaactgttggaaagagagcaactctctggatgcaggagtttgaaatggatcttgaggatctggaatatgtacttggaagcctgaaactgcttggatctaaaggaacaacaggaacacaggcaagtttccttgaactgtttgacggagatcaggagacaattgacaaaatcgatccaatgatcgctgagaagatgggatttaaggcatgttatccggtatccggacagacttattcaagaaaagtagacacaagagtactgaatgtactggcaggaattgctgcaagtgctcacaaattctctaatgatatccgtctgctccagcatttgaaagaaattgaagaaccatttgagaagacacagatcggatcttcagcaatggcttataagagaaacccgatgagaagtgagagaattgcttccctttcaagatatgtgatgatcgatgcacttaatccggcaatcacatctgcaacacagtggtttgagagaacacttgatgattccgctaacaagcgtctgagtgttccggaaggattccttgcaatcgacggaatacttgatctttgtctgaacgttgtagacggactggttgtatacccgaaagtaatcgagaagcgtctgatgtccgaacttccattcatggcaacagagaatattatgatggatgctgttaaagccggtggagaccgtcaggagctgcacgaaagaatccgtgagctttctatggaagcaggaagaaatgtgaaagagaagggacttgacaataaccttcttgaactgatcgcagcagatccggcattcaacctgactttagaggatcttcagaagacaatgaaaccggagaaatatgttggacgtgcaagtgagcaggtagatgcttatcttaagaatgtgatccgtccactgcttgaaaagaataaagagatccttggcgtgaaggctgaaattaacgtatagaatccttggaatctatcaggacaaagcggaaaaatcaaagggatgttgcatttggttgcagcatccctttttctttgataaactaaaattatttcgtatattaaaatgtgggggaaagagaaaggaataagagaacatggatataggactgaattggaatgaatggcatcaggaagcggcgagaaaaccatatgtcagagtgggagtgactttattaagtggtgcgctgattctgatgtctgcacaggaaattgtttcattatatttggaaaagaatctgatttccgaaatagaggtctgtgcgacaacagaggatataaatgtgtcaggaaatgatctgccggaaaaagtaacaataacaaaacagataaaagaaccggaaaaaatggatgagcattctttcttatcagcagaaactatccggacagatgttaatcaagcagatgttatccaggtagcagctgttccggcagaaattttagtggaagaacctatggtagaagaaattgcggtggaagaaccagtagtagaagagattgtggcagaaaaaccagacgtgaaaagagatacaactataaatgttgcaagtgaaccggtaattacaaatcctgattcaatggaaaatgtaaaaaatgaaaatgaggatgaagaagggtcgatagcagtgggaaatacagataccggatatcttattaatgcggaaggtatgatctgtggactttcaggagacaaagaagtgataaaggatggagtattgtactttcctgaagaaggatgttccggaattgcgagaggagcactgtcgggtcttggttctgctgtagaagagattgaaattcctgctaatataataaatattcagccaggagcgtttgtggggctgagtaatctgggatggatagaagcagatgcagcaaatccagcctatgttacggtagatggtgtactttacacggcagatggcacagttcttcttgcatttccggcagcatggacaggaacctttcaggtgccggaaagtgtgaaaagttttgcggaaagtgcatttgatggaacaaatctggaatgtattgatgcaagatcctgtacacttgaacaggcgggaagtattcctgaaacggtgaaacttttggagtaaaagaaaaacattgattttgtttgttgaagaatctggggacttgcgctataatatgacgagattgaacaataacaaacaagaattggagaagatagaatgagtaagaaagtaagaacaagatttgcaccaagcccgacaggaagaatgcatgtgggtaacttaagaacagcactatacgcgtatctgatcgcaaagcatgaagggggagatttcctccttcgtgtagaggatacagaccaggaacgttttgtggaaggtgcacttgatatcatttacagaacaatggagaaaacaggtctcatccatgatgagggaccggataaagatggcggatatggaccgtatgtacagagtgagcgtaatgcatcaggactttatcttaaatatgcaaagcagcttgtagagcagggagatgcttattactgtttctgtgacaaagagcgtcttgagtctttaaagacacaggtttccgaaggtggagtagagatttctgtttatgataagcactgcttaagtctgagcaaggaagaagtagaggcgaatctggcagcaggtaagccatgggttatccgtctgaatgtaccgaatgaaggtgagacaacattccatgatgagatctacggagatatcacagttccgaatgcagagcttgacgatatgatcttgattaaatctgatggattcccgacatataattttgcaaatgtaattgacgatcatctgatggagatttcacatgttgttcgtggaaatgagtacttatcttcagcaccgaagtataaccgcctttatgaggcgtttggctgggaagtaccagtttatgtacactgtccactgatcacagatgagaatcataagaaattgagcaagagatgtggacattcttcttatgaagatctgatcgagcagggatatgtttcagaggcagttgtgaattatgttgcactgctcggatggtgcccgacagataacagagagatcttctcattggaagagcttgttgaggcatttgattatcatcatatgagtaaatctccggctgtatttgatacagtgaaattgaaatggatgaacggagaatatctcaaggcaatggattttgataagttctatgcacttgcggagccttatctgaaagaggcagtaacaaaggactatgatctgaagaagattgcaacacttgtgaagacaagaattgagattcttccggagatcaaagagcaggttgatttctttgaagaacttccagattacgatattgcactgtatacacacaagaagatgaaaacagatcctgagaagtcactcgcacttctgaacgaggttcttccggttctcgaggcgcaggaggactttagtaatgatgcattgtttgagacattgaaagcatttgcaacagaaaaaggatacaaagtaggttatgtaatgtggccgcttcgtacagcagtttccggaaagcagagcactccgggtggagcaacagaactgatggaagtactcggaaaagaggagtctcttagaagaatccgtcttggaatcgagaaacttcagtaaggacagcgaaaagaggtacaatgggatttaatgaagcacaggcgcaggcgattcagcacacagacggcccatgtcttgtactggcaggcccgggatcggggaagacgcttacgattgtaaacagagtaaaataccttatagagaaacagaaagtaagaccagaagaaattctggtcgttacttttacaagatttgcagcggcggagatgaaatcccgcctctgtttggttatgggcaaaagagatcttccggttacagtgggtacatttcatggaatctattatggaatcctgaaatgggcttaccggatgaatcaggaaaatattctttcggagacagaaaaatatcagattttgcgtggcgtgattaacaaggaaagaatggagatctttgatgaagaagattttattcaggatattgcggcagaaattggaaaagtgaagaataatcggattccgctggaagaatttgtatcagaaaagtgtagtgcggatgcttttcgcaatatttaccgtaattatgaacagcatagaaaagaactgaaaaagattgattttgatgatatgctggtactttgttatgaattgttccaatcaagaccagatgtacttgcacagtggcagaagaaattcagatacgttttgattgatgaatttcaggatattaatcgaattcagtatgatgtgatccgtatgctggcccagccggaaaataatttgttcgtagtaggggatgacgatcaggcaatctacggatttcgtggagctgattcagaattgatgcttggatttggaaaagatttccctgatgcaaaacaaattctgttgggaatgaattaccgttcgacagcaaatatcgtacagaattctttgaaactgattgaaaataatgtggagagatacagtaaaaaattggaagcaaaccgtgaaggcggttcctgccttcatattcaggaagtgaaagatccggtggaagaggcagaatatgttcttgaagagatacagaaatgtaaggagaatggcataaaagaagaggagattgcgattctattcagggttcatacagatgcgcgagcagtggtagaagcaatggtggagcggaagatcccgtttcagatgaaagaacatcttccaaatatatatgaacactttatcgcaaaggacatcatggcatatttccgactggcaacaggagctcggcacagacaagattttttacagataatgaaccgaccaaagcgatatcttggaagagacagtgtagcaggagcgaaggtttcttttgaagacatgcggaagttctattgtgataaagactggatgatcgaccggattgatcagtttgagtgggatgttaagatgcttatgaagatggctccatatgcggcaatccagtatatcagaaaaaggattggttatgacgattttctgaaagagtatgcatttacacatcagataaacagatctgatctgaatgaagtactggcagagatcgaagaggcggcgaaagcattttcaagtgttgaagaatggtttgcacatgtagaagaatatacggagactttgaaagtgaaggaaaaggaaagaaacagaccacgtccgggtgtccggctgatgacgatacatgcttctaaaggactggaattcaagcaggtatttctgattgcggcgaatgaaggaaggattccgtatcagaaggcaaagacagacaaggagatcgaagaagagagaagattattctatgtggcaatgacaagggcaaaagattttctgaagatctgttatgtgaaaataaaaaacgggaaagaagttactccttcccgttttgtagacgaactattgaaaagctgaccggatgtcagtcactttgctgacatcctcaagacttagtcctccaggtcatctaatgcatcaagatcgatatcgccgaaatcctgtgtatccagccattcgttgaatatagcggaaacacggtcgaactcttcatcttcttcgatgttctcaagtccaggttcttcctcttctccgttatcaatgaaacgatacagatagatctgaccgtctgtgttatcaccgttttcatccagtggaagaagtgcgatatactccttttcatctgcttcaaaaatattgagaacagcgcattcaagttcctcattattctccagtgtcaaagtgactgtgagggattcgttttcgttcataatcttctcctttgaatctgtgttgtatttcattccgtattgaccagccaggtgctcaaaacgagaatgatcagctatcttgatggtaacaaaaaggggagaaaaaagcaagataagattgactttcgggttaaacaaggtagaataaaagtgttactgatagaagtgaaaggataatagacaatatgaagaaaagatggatactgtgtacagtggcagttttgtgtatagcggcagcactgcttggatgtggaaagaaaaatgttggaacaccggaagataatgcagtagtagaagagaatgataagaaaaatgataatacaggggaaagtggcagactgtttggatttagtgggattgatatgtcgaatcctttttatgacacattgaaaaattctgtccagacagcattagaggctcaaggtgaccgtctgatggttcgtgatccggcatcagatgctgatttgcagaatgaacagattcgggagttgatcaacgaaggggtacaggcagtatttctttgtccggtagattgggagaaaatcactcccgcacttgaagccttaaaagaggcagatattccggtgatcaatcttgatacagaagtaaaagagacaagccttgtatctgcatttgtagggtcagataatgagaatgcgggatatgtatgcgggcaggatcttctggtccagaaaccagatggtggcaaaattgtgattgtggaaaaccctggggtgaactcagtgaatgagagaattaccggatttgaagaggctataacaaacagtgggtttgaagtggtaaagagaattgaagcattgggagacagcagtaatgtgaaggacgagatgacacaggttctgagcgaaaatagtgagattgatgctgtaatgtgtggtagtgatcctatggcagaacaggtgatggcagcgatcacagaagcgcagagaacgaatatctgcgtgtatagtgtggatggttccccggcgacaaaaacagcactggtgaatggcactggaggaatgaccgggattggagcacagtccccgatcaatatgggaaagacagcagtaaaggtggcgacagcattactggcagacaaggattacgagaaggataattatgaggaaactttctttataaatcgtgataatgttgaaatgtacggaacggatggatggcagtaatttattgattgctcaagaaaggggttaactatgaggaagataaaggggagtccgcagccatttggagtggatatcaaaggcaaaaatataaattttgccgttcaggtagcaaaagggaagacatgtgaacttttactgtataagagaggaaaagaagttccggaatatcagtttgatatgccggaggaagaaggcgttggagaagtacgtttcttatctgttgaaggtctgaaagcagatcgatatgaatacaattttctgattgatgggaaagtatgtgtggatccatatgcaaaagaacttgcaggaaaagagaaatttggtgtagaacggaaacttcaggaacatcagattcgtgggaaaattgtttcaatggaggactatgactggcaggaggatcagcgcctacatcttccatgggaagatgtagtggcttatggtttgcatgtgcgtggatttacaaaacattcttcttcgaaagtggtgcataagggaacattccagggggttgttgaaaaactggattatttaaaagaacttggagtcaaccagattcagtgtatgccggtctatgaatttgaagagtgcggaaaaacaaaagtgaactattggggatatggtaaaggtttttattttgcccctaaaaaagcctacgcatatgggaaaagtgcagttcgtgagttgaaagatatggtgcgcgcatgtcatagtcagggcatagaagttgtactggagatgccatttgttccgggaatatcagcaaattatgtaacggaatgtctacgcttttatatgctggagtatcatgtggatggatttgttctgaatccttataacgtaccgtgggagcagctgatagaagatccgtttttgaaagatatcaagctgatgcagaaagatgatggtttccagaatgtgatgcgtcgcttcttaaaaggtgacgagaatatggtcaatgatgtcatctgggcattgaaaaatcgttcatcggaaaatggaaaatgcaattatattacaacacagacaggatttacgttatgggatttagtgtcttatgattgcaaacataatgaagaaaacggtgagaagaacctggatggaccagattataattacagttggaattgcggagctgaaggaccgagcagaaaacgcgcagttgtcaatcttagaaagaatcaagtgaagaatgcattagaactcctgttgacggctcagggaactccatgcctccttgcaggagatgaattctgtaattcgcagagaggaaataacaatgcatattgtcaggataacgagacaggatgggtgaactggacacagttgaagaaagatgactggctgtttcagtatacaaagaaactgatcgggctgagaaaagaacatcgttgtctccaccagagtacagcactatccggaatggataccacgagatgtggcataccggacgtatcctaccatggagaaaatgcatggcaggtaaaagcagaagtttccagccgtcagttaggtgtcttgtattcaggaacgaaagaaggggagttcccttgttttacagcatataatatgcattggctgccgcatcacttcgcaataccgtcgattggaaagaacgtagaatggtatcttgttatgactacaaaagatggcgtgctttgtgaagcaaaaaagctggaaaatcagaaagatgtattactggaagaacgtagcgtagcaattctgcttggacgtaggatagaggaaaagaagagtcgttcagaaaagaaaccgattcatacagctaagacgcagaatgtaaataaaatagaaaaacggcagggagcagaagaactttgtaaagaagaacagccggccagagagggaaaagtatgaaggcatttgcacatttttgtaccataacaaaacacaaaaaactggtattgaaagagtgttttcgtgttgggttgtacaaacagggactgctccatgatatgtcaaaatacagttggacagaattccgtgtgggatgcagatactatcaggggacaagaagccctaataatgccgaacgggaagaaaaggggtattcttccgcatggctccaccacaaaggcaggaacaaacaccattatgaatactggattgattatagtctggaaggaccgaaccttctggcgggaatgaagatgccggtgagatatgtagtagagatgtttcttgaccgcattgcagcaagtaaagtgtatctcggggatgcatatacctctgatgcaccgcttgcttattatgaaaacggacgtgcagatgagctgatgcataaagatacaagagaattattagaaaaactgcttcatatgcttgcggaagaaggcgaggaaactacttatagatatatcaggagagaagtattaaaaagataagaagagggagtgtaggcagcagtgaggctatatattgtgcgtcatggagagacggattggaacaagaaaaaactggtacagggacgaaaggatattcccttaaatgaatatgggcgtcatcttgcccgggaaacttcttatgggatgagacaataccagattgatctggcttatacaagtcccttacagcgtgcaaaagaaacggcagagattcttcttgaaggacgcaacattccgctttatgaagatcagagaatccaggaaatttcttttggctcgtatgagggaatgtcttgtgtagataagacgaaaaaagagaatcttgcattccagaaattctttcaggatacgggaaattatattccgccggaagatgctgaaagtgtagaacaactttatgaaagaaccggagagtttttaaagagtcttgaagagagtaagaagttgaaggataagaatcttttgatttctactcatggtgctgcgatgacagcaatgctgaacaggatgagaggcagtctttcagtagaacatttctggaaaaatgaagtaccgccaaattgttctgttacgattgcggaacttgaaggcagtggattcaaaattatccaggaaggaattatcttttacaaagaagaagtgaaacactggaaagcagtgtagtataaaaggcagaatgtaagtgctgtggtacttgtattctgcctttccttatgctattctttagttgtctggccggcagatccttaagccggcaatgattcacatgaacttcaattcttctgtttcaggaagaggattccatggtatatcgtattattgcaacaaaattaaggggaagaattattgttgacattttgaaagaagtataataaaatctattcatagacgaacaactgttcgaaaaagagagaatgggttttatacactaagagagatagagaaggagaaaattatggcaggcaaagagagcgttacaaagctggcgaataacgaagagaagaagaaagcactggatgcagcgatcgcaaagctggagaaagattttggtaagggtgcagtgatgcggctgggagaatcaggggcgcatgtagctgtagagacagttcctaccggatgtctgagccttgatctggcacttggacttggcggtgtgccaaagggacgtgtgattgaggtttatggtcctgaatcaagtggtaagacaactgtcgcacttcatatgatttctgaggttcagaagagaggcggaattgccggatttatcgatgcagagcatgcactggatcctgtatacgcaaagaatatcggagtagatatcgatgaactctatatttcacagcctgacagtggagatcaggcccttgagattgcagagacaatggtacgttcaggggcgattgatattattgtcattgactctgtagctgcacttgttccaaagcaggagatcgaaggggatatgggagacagtcatgttggtttgcaggcaagattgatgtcacaggcattgagaaaactgacaccggttatcagcaagtcaaactgtattgtgatctttattaaccagctgcgtgagaaagttggagtaatgtttggaaatccagagacaacgacaggaggacgtgcgctgaaattctatgcatctgtgcgtatggatgtcagaagaatcgagactttaaagcaaagtggagagatggtaggaaaccgtacaagaatccgtattgtgaagaataagattgctccgccgttcaaagaagcggaatttgatattatgtttggaaaaggtatttcccgtgcaggagatattcttgatctcgcaaccaatattgatcttgtgaagaagagcggtgcgtggtatgcatatgagggagagaagattggccagggaagagagaatgcaaaggcatatctggaatcacatccggaagtgatggagacactggatcagaaggtgagagcacattatgcattatctggatcagaagaagcagagaatgagcttccagatgctgagaagaaggcaggggcatcaagtgatctgaagctgacaccggcttctaaagtggctgatgaggcagaaaagaaagaatgattgttactgggatagaagagcagacaaagacgaagtttaaagtatatctggatggaacatttgcatttgtgctttataaaagtgagttgaagcgttttggtataaagcagggagaagatctcgcgcaggaaaattatgaaaagattcagaatgaggtactgttgaaacgcgcaaagaagagagcaatgcatttgctggaggatatggatcgtactgagtctgcattaagggaaaaactgaaggcgggacaatatccggagaatgcaatcagcggagcaattgaatatgtgagatcttttggatatctggatgatgcaagatatgcggaaaattttgttatgagccgcaaagatactaaaagcaaacgggaaatcaaggcactgctgtcgcagaagggagtttctgatgatttgatctgcctggcttttgaacagtgctatagtgaagattctgaggaagaggcaatccgaaggatactgcgaaaaaagaaggttgatccggaaagaatggaagagcaggaatatcaaaagatattaggatatcttgcgcgaaaaggatttcgttatgaggtgatccgccatgttatatcagattatgataaacagagtaactgtacactcccgtgtcaatcactccgctgattgacacggaggatgcgtgttttgacttgaatgcatctcgccccatcgccaaaggcgatttaaaatggcgagatgcgttgctggtcgcacatcgtgtgaacagtaaccgggttatgtcatgtgatacaaaataataattacaatgcttgacattgttgttgaaacagtataaaatttaagtgttgtatttgagtaatatgtacaatgaaaatcgaataaggaggtgctcctgtgcagataagtctaggtttatttataggcgttgccgtggccctcgcgttgatagtcggaatcattactcactttgttacagtttccaatctgagaaagaatgcggaaagcaagattgggaatgcagaagcaaaagcaagagaaatcattgacgatgctgtaaagactgcagagacgacgaagaaggaatctcttttggaagtaaaggaagagtccatcaggacaaagaatgaacttgagaaagagacgaaagaaagaagagcggagttacagcgttatgagaagcgtgtactcgcgaaggaagaatcggtcgacaaacggtcagatgtactggaacatcgtgagagcaaactgacagcgaaggaagaacatcttcgccagcgtgaagccaaagtagaagaacttagccagaaacgtgtgcaggaactggaacgaatctcaggacttacctccgaacaggcaaaagaatatctgttaaaaactgttgaagatgacgtcaagcatgacacagccaagatggtcagagaactggaaactcaggcaaaggaagaggctgacaagaaagcaaaagagtatgttgtgaatgcaattcagagatgtgcagcagatcatgttgcagagactacaatttctgtagttcagcttccaagtgatgagatgaaaggaagaatcatcggtagagaaggaagaaatatcagaacactggaaacattaaccggtgtggaactgatcattgatgatactccggaagcggttgtattatcagggtttgacccaatccgccgagaagttgcaagaattgcacttgagcgtttgatcgtggatggacgtattcatccggcaagaattgaggagatggttgaaaaagctcagaaagaagtggatacaatgatccgcgaggaaggagaagctgcagctcttgacgttggagttacaggaattcatccggagttgatccgtcttcttggacgtatgaagttcagaacaagctatggacagaatgcattgaagcattcaatcgaagtagctcagttatcaggtctcattgcaggagaaatcggactggatgtcagacttgcaaaacgtgcaggacttcttcatgatattggtaaatcaattgatcatgatgtagaaggatcacatattcagattggttcagatctttgtagaaaatacaaagaatcagcaaccattattaatgctgtggaggcacatcatggtgatgtggagccgcagagtctgattgcttgtgttgttcaggcagcggatactatttcagctgcaagaccgggagcaagaagagaaaccatcgagacatatacaaacagattgaaacagttagaagatattaccaaccagtttaaaggtgtagataagtcttttgccattcaggcaggtagagagattcgtgttatggtagttccggagcaggtatctgacgatgatatggtgcttttagcaagggatattgcaaaacagattgagtttgaattagaatatcctggacagattaaagtaaatgttattcgtgagtcacgagcaacagattacgcaaaataagagaatcataacagaagatgaaagttggcccttgtcgaaagacaggggcttttagtttactgagaaagctattacaggtaagcgtaaaattcttgttactgttcactcccgtgtcaatcactccgctgattgacatggaggatgcgtgttttgacttgaatgcatctcgccccatcgccaaaggcgatttaaaatggcgagatgcgttgctggtcgcacatcgtgtgaacagtaacaaagtctttgatatagaatgcatacggtgatgtaaggtaaaagaagggagaacggaatgagcgagaagattaaaagaattaacagagaattgaaatttaaaggaaagattcttgatttttatcaggacacgatagaagtggacggggatcataccgtagtatgggattttataggtcataaaggagcagcagcggtagttccggttacagcagatggtaagattttgatggtgagacagtatagaaatgcgctggatcgatatacattggagattccggcaggagcacttgatgaagtgggagaacctggtatagagtgtgcgtctcgcgaattagaggaagagacagggtatcgcagcgagaatcttgagtggctgatcactttacggacaacagtagcattttgtaacgaacggattgaagtttatgtggcacatgatctgataccgtcaaaacagcatttggatgaagatgaatttattgaacttggcgcttatacaatagaagaattgaaggaaaagatcttttcaggtgagattgaagatgcgaagacagtttcttctttgatggcttatgctgtaaagtatggaaaatgattgaatgccgacaataagtagcatcgctgccgcatgagaaaaaccagacactcatataatggtgtggaagattgaggataaaaatatatccgcagaacattttatagggtgggaggaatactggtgaaggcatttcgtacaggtcattactttctggctctgttttttacaggctttttgacaggaatcttgattgtcaattatatatggggagaacagctgagcctgatcggaacttttacagaagtttatcttatgagattaaagaatgagaagatatcttttcaacagtacatttggtatttgattcaggtacggggaatttttttcctggtgctgtttttggcgatgggaatccggattagaaaaattgtggcagcgttttttcttctgtggactgggatgtcaggaggaattttactgtcagaggcagtggcagaattaggaatgaagggaagtattctttgtgtggcaggactatttccacagttccttttttatgttccggcagttcttgtgcttttgcgcttttgttggaactatccacagaatcagtggaacagacaaaaaacgttctttgtatgcggtttgtttttaattgggattttttcagaatcctgtcttaatccgtggctgattcaacagattgtaaatattcttttttgatttcgtgggaaagtgtgagtaatgcaacgaggcagacagttgattgactgatgaaaagtccccataggtatcctgtgattccatagtgcgggattccgaaatatacactaagaatgcggatggataatccaagaagattgatcatcagtgtcagggttgtaagtcccagtccgttgattgcactgagaagagcggaacttgtgtacaggaaagggcagatccaggcaagtgttacgatgaaattaccggctaaagtactgtgaaacaggaagtttccgagaaaagacccggtaagaagaaagaagacagaacacagaagaccaagggagaaacatcctccggcagccttttttataaggagaaatgtctcttttgaagagctttcagcctgcttttgtgcgacagcagggattaaaagcaggctgactgagtttgtgagtgcactgggaaaaaggatacatggtaatgccattccggtcagtactccataaatactgagagcttcggaagcactgtgagatgcaagctcaaggcagacagggattgaagctgcttcaattccctgcaagaatgtaattgctgtgcgattaactgtcaatggaacagagaggcgtagcaattcagaacaagattttgagatagaaagaatatatggagaatcggcatcaaaacccctcttcttcagtgaaaaaagcgagtagcctgctgctgcaagttctccgaaaataatacctgatacagccaatggaatctcagggtgaactccactgcgtataaaaataaaatataaaaccaaaacagaagaaattcgaacaaattgttcgattaactgtgaaatagccgggacagaggttctttgcagaccatagtgataaccacagatacaactgtggacagaagccgccggaagtgcaagaacgatcagatataatagtgttgcacatcttggatctccaagaaaacgatttgaaagaaaaacggaattcttctgtaccagaaaagtacaaatcagagaaatcagaacagaaagaatcaggcctgtctggaaaatcaactttccgtcctgcgttcggccaagggagtgaaagcgagagacacttctggaaatggcagtttcaagacctgaagtactcaaagacaggcagagtgcgtagaaagggaaaattaactgataaagtccgacctgttcttctccaaaggtatggcttaagaaaatacggaaaaagaatccgagaacgcggcttacaagaccggcagatgtgagaatcagtgttcctttaatcaaagaatgtttttttctaaacataataccctcatgtcaaaatgattgctgccacgtgcaacgcggacagtaaccagaaatgaacttatttttaaacaacatattcaagaaacatccttgacagaacgtaagactggtgatatcctacaaaaggaaaccctagcataatactaggaaaagaaaaaaaagaaggtgaagatgtgaaactgtcaacaaaggggaaatacggattgcgtgccttgatcgatctggcccaatacagtgaagattctccggtttccatcacaagtattgcaagacgtcaggatatttcagaacgatatctggaacaattgatgtcgaagctgaaaaaagcaggacttgtcaagagtatccgaggtgcaaatggtggatatgtcttagcaaaggaagcaaaagatatttctgtaggagatgtgcttcgtgcactggaaggaaatcttgaaccagtagaatgcgccggacttgatccggaaggagaatgcaaaggtgcagacagctgtgtaacaaagtatgtgtggaaacgaatcaatgatagtattaaccagacagtagatgaaatctggctgaaccaactggtgacagaaagtaaatgtcttggacatacagacaatcatctggattatacaaagtgtaaaaactgaaaagaatcattgtctacaattatttgtgaacggtaagaaaacaaagcagataaaataaaagtgaggtaacaggtaatgggaaaattaatttatcttgataatgcagcaacaacaaagacagcaccggaagttgtggatgcgatgctcccatattttacagagcattttggcaacccatccagtgtttatggttttgcggctgcgaataaagaagtgatcacaaaacagagagaaatcatagcaaaagcacttggtgcgaagacagaggagatttatttcacagctggtggttctgaatctgataactgggcgctgaaagctacagctgaggcttatgaatcaaagggaaaacatatcattacaacaaagattgaacatcatgcaatccttcatacaggagaatatctccagaagagaggatatgaagtgacttatctggatgtagatgaaaatggtattgtcagtccggaagctgttgaagcagcgatccgtccggatacaattctggtcagcgtaatgtttgcaaacaatgagatcggaagtattcagccaatcaaagaaatcggagagattgcacataaacatggagtacttttccatacagatgctgtccaggcgtttggtcaggtaccgatcaatgtagatgagatgaatatcgatatgctcagttccagcggacataaactgaacggaccgaaaggaatcggattcctttatatcagaaaaggagtgaagatccgttcatttattcacggcggagcccaggagagaaaacgccgtgcaggtacagagaatgttccgggtattgtaggatacggaaaagctgtagagcttgctatggcttccatggaacagagaatgaaacatgagacagaacttcgtgattatgcaattgcaagaattgagaatgagattccatattgtagattaaatggagatcgtgtgaaacgtgttccgaataacattaacttcagcttccaatttgttgaaggagaatctttgttgatcatgctggatatgaaaggaatctgtgcttccagtggttccgcctgcacatcaggttctctggatccatcccatgtccttcttgcaatcggactgccgcatgagatcgcacatggttcccttcgtatgacacttggagctgatacaacaaaagaagatatcgactatacagtagatcagcttaaagagattgttgcccatctgcgcagcatgtcaccgctctacgaagattttataaaaaagcagcagaagaatgcataagtcagaatgatttaaaaggaaaatacagaataatttttggataaaaagataaacaaaatggaggaattacattatgtatacagagaaagtaatggatcattttcagcatccaagaaatgtaggagagattgagaacgccagcggtgtaggaacagttggaaatgcaaaatgtggagatatcatgagaatctatcttgacattgatgacaaccagatcatccgcgatgtgaaattcaaaacattcggatgtggagcagctgttgcaacttccagtatggcaacagagatggttaaagggaaaagcattcaggaagcaatggaagtaacaaacaaagccgttatggaagctcttgacggacttccgccggtaaaagttcactgctctctgcttgcagaagaggcaatccatgcagcactctgggattatgcagagaaacatgggattaagattgaaggcctgaagaaaccaaagtcagatattcacgaaggtgaagaagcagaggaagaggaatattaatgagcaaaggcaaagttgttgcaggtatgtccggaggagttgactcctctgtggcagcctggcttttaaaagagcagggctatgatgtgatcggtgtgacgatgcagatctggcaggatgaagacaacgtcgttcaggaagagaatggaggctgctgcgggctcagtgcagtggatgatgcaagacgggttgcggcgtctataggaattccttattatgtaatgaactttaaacaggaatttcagaaaaatgttattgattactttacagaagagtatctcaacggaagaacaccaaatccatgtattgcctgtaaccgctatgtgaaatgggaagctcttttacagagaagtctttcaattggagcagattatattgcaacaggacattatgcaaggattgataagctcccgaacggaagacatgcaatccgcagatctgcaacgcttgcaaaagaccagacttatgcactttataatctgacacaggaacagctggaacatacattgatgccggttggaaattattcaaaagatcagatccgtgagatggcagaaaaaatcggactgcaggtggcaaataaaccggatagtcaggatatctgttttgttccggatggagactatgcatcttttattgaagaaaacgcagatgctccgattcgtcagggaaatttcgtaacaccggatgggaagatccttggaaaacacaaaggaatcattcattatacagtaggacagcgtaaaggacttggacttgcattagggtatcctgcatttgtactggagatacgtccggagacagatgaagttgtaatcggaacgtatgaagaatcattgacgcatacactgcgtgccaatgagttgaattttatgagcgtggaagatcttacagaaccgatgcgtgtgtttgcaaagattcgttataaccacaaaggagcctggtgtaccgtggagaagacaggagaagatgagattacctgtacattcgatgaaccaatccgtgcagtgacaccgggacaggcagttgttctgtatgatggagaatatgtattaggaggcggcacaatattatgataagatgtgatgcccacatgcatacaaggttttctgaggatagtgatgcatccgtacattctatgcttgatgcagcaatagaaaggggaatggaagcagtctgtattacagatcatcttgataaagattttccgaagacaccggattttccggcgggtgcatttctgtttgatctgggaaactattttcagaggctgacacagttaaaagaagaatatcagaagaaactggaagtccgaatcggtgtagagatcggacttcagccgcatctgggggaatattatagagaactgacagaaaaatatccgtttgattttgtaatcggttcagtacatcttatccatggacaggatccgtattatcgtggattttttgaaggacgaagtgatgaagaggcttatcatgaagcatttgaggtgacagttgaaaatctgaaaaaaatagattcctttgatagtttgggacatttggactatgttgtccgttatggcgcacatcaggcagaaggatattcttatagaaaatatgcagacgagatcgatgagatactaaagcatctgatcagtcatggaaaaggacttgagatgaatatggcaggaatgaaatatggtctcggattcccgaatccacatccggatgttatcagaagatacaaggagcttggtggtgaaattgtcacaattggtgcagatgcacaccgtccggaacatgtcgcttttgactttgacaaggctggcgagatacttataagctgtggttttagttattatgcagaatttaaggggcggaaaccgatatttaagagaattgttccataaaaatcgaattatatggatttaagggttgaatttttgttcctgttttagtacaatgaatctagttgatgaatatttaacaattatcgctttgttaaattcatcgccatggctggagatacagtcataaattttttaaactttttaggaggaattaatcatggcagtaaaagtagcgattaatggttttggacgtatcggacgtcttgctttcagacagatgttcggagcagaaggatatgaggtagtagcaatcaacgaccttacatctcctaagatgcttgctcacttattaaaatatgactcaactcagggaacatacgctcttgcagacacagtagaagcaggagaggattccatcacagttgacggaaaagagatcaagatctacgcaaaagctaacgcagctgagcttccttggggagaaatcggtgttgacgttgttctggagtgtacaggattctacacatccaaagcaaaagctcaggctcacatcgatgcaggtgctaagaaagtagttatttctgctccagctggaaatgaccttccgacaatcgtttacaatgtaaaccacgagacactttcaaaagatgagaacatcatctccgcagcttcttgtacaacaaactgcctggctccgatggcaaaagctcttaacgaccttgcagcaatcaagtccggtatcatgtgtacaatccacgcttacacaggagatcagatgacacttgatggaccgcagagaaaaggtgatcttagaagatctcgtgcagctgcagttaacatcgtaccaaacagcacaggtgctgctaaagcaatcggtcttgttatcccagaactgaacggaaaacttatcggatctgctcagcgtgttcctacaccaacaggttctacaacaatccttacagcagtagttgacggagaagttacagttgatcagatcaacgaggctatgaaggctgcttccaacgagtccttcggatacaacacagatcagatcgtatccagcgatatcgtaggaatgagatatggttcactgtttgatgctactcagacaatggctcttccagttggcgatggtacaacagaggttcaggttgtttcatggtatgacaacgagaactcttacacaagccagatggtaagaacaatcaaatactttggaaaacttcttgaggcttaattctttttgagaaattagaatctcagagatttatctgaattattgactcacaatggggtccggtcttattgtaggaccggactccattttctttgtgcagaacagatcctgcacgtgaaagtgacaggaaatagaaatacaggaggctatgaaaaatggcagcacttaataaaaaatccgtagatgatatcaatgtaaaaggaaaaagagttcttgtaagatgtgacttcaacgtaccgcttcaggatggaaagatcacagatgagaaccgtatcgtggcagctcttcctacaatcaagaagctgatcgctgatggaggaaaagtaatcctttgttcccaccttggaaaaccgaagggagagccaaagccggagctttcacttgcaccagtagcagtaagactttctgagcttcttggacaggaagtaaaatttgcagctgatccggaagttgtaggaccgaacgcaaaagcagctgttgaagctatgaaagatggagatgttatccttcttgaaaatacacgttacagagcagaagagacaaagaatggtgaagcattcagcaaagatcttgcatctctttgtgatgtatttgtaaacgatgcattcggaacagcccacagagcacactgctctaacgtaggtgttacacagttcgttgacacagctgttgttggatacttaatgcagaaagaaatcgatttccttggaaatgcagtagagaatccggagagaccatttgttgctatccttggtggatccaaagtttccagcaagatttctgtaatcaacaaccttcttgacaaagttgacacactgatcattggtggcggaatgtgctatacatttacaaaagctcagggcggtaatgtaggaaattcccttcttgaggaagattacttacagtatgcacttgacatggttaagaaagcagaggagaaaggtgttaaacttcttcttccagtagatgctgttgcagcagatgctttctctaacgatgcaaatacaaaagttgtagctcagaacgagatcccggacggatggatgggtcttgatatcggacctaagacagctgagatgttcgctgatgctgttaaatctgcgaagacagttgtatggaacggaccaatgggatgcttcgagatgccgaaattcgctgaaggaacaaaggcagtagcagaagcacttgccaacacagatgctgtaacaatcatcggtggtggagattctgcagcagctgttaaccagcttggatatggtgataagatgacacatatctctacaggtggtggagcttctcttgaattcctcgaaggaaaagaacttccgggagtagcggcagctaacgataaataataagaatctgtaattacagattagaagaaacccgtgttgttacatttcacacgggttctgaatataaaattcaaggagataagaacaatggcaagaaagaaaattattgcaggaaactggaaaatgaacaaaactccaagtgaggcagtagcacttgtagaagagttaaaaccactcgtagctaacgaagacgtagatgtcgtattctgcgtaccggctatcgatatcgtaccagttgtagaggctgcaaaaggaacaaacatccaggttggagctgagaacatgtacttcgaggagagcggagcttacacaggtgagatttccccgaacatgcttgtagatgcaggtgttaaatatgtagttctcggacattctgagagaagagagtacttcggtgagacaaacgaagatgtaaataagaaaatcctgaaagcatttgagcatggtattacaccaatcatgtgctgtggagaaactcttgagcagagagagcagggcgtaacaatggacttcatccgtcagcaggttaaggttggattccagggtgttacagcagatcaggctaagacagcagttatcgcttacgagccaatctgggcaatcggaacaggaaagacagctacaacagagcaggctgaagaagtttgtgcaggaattcgtgcttgcatcgcagaagtatatgatgaagctacagcagaagcaatccgtatccagtacggcggatctgtaaacgcagctacagctcctgagctttttgcacaggctgacatcgatggaggtcttgtaggtggagcttcccttaaggctgacttcggaaagatcgttaactacaaataataagatctaaggctgtttcattataacagataattaagaaaggtcatctggtcagaaagatatttatattgccgggcacaggtagtgcagacagtagcgatatagatagcaattctgacaggatggccttttttcttgactttgaaaatcatttgagtgtatcatagaggagattgataaaataatgtaacagcttaatgaagaaaaataaagcaattagaaaagggaatataaaagataggagattaagaagctatggtaggaattatcggagcgatggaagaagaagtccgtgagctgatcgaggatatgacagaatgcgagatgcaggaaaaggcatccatgaaattttataaaggtcagctttatggaaaagaagcagttgttgtacagagcggaatcggtaaagtgaacgctggaatctgtacacagatccttatagacttttatcaggtggatcagctgatcaatacaggtgtagccggttctctggatgcagagatcaatatcggagatattgttgtatctacagatgcagtagagcatgatatggatgtcagtgcattgggagatcctgttggacaggtgccgcgtatggatgtatttgcatttccggcagataaagaacttgtgagaaaagcagtggaagcaaataaaaaggcgaattcagatattcgtacatttacaggaagagttgcaagcggagaccagtttatttctgaaaaagaagtaaaagaacgtattgttaataattttggtgcgaaatgtgctgagatggaaggagcagcaattgctcacggtgcatatttgaatcatgttccatgtgtgatcattcgtgcaatctcagataaggcagatggaagtgcacaggtggattatcctacatttgagaaacaggcgatcgttcatggtgtaaagctgatgaaagaattgcttccgacattataagatttttaatgtagtgatttttacatgaattcaggcgaaaatctgcttattttcggatatatttgaccagagctctgacttgcaaaattgtgctaaaactagtacaataaagcgtagagttaaaaaatagacaatcttaatgcaaaggagatattgagatgagcaaaaaaccaaccgtattgatgattttagatggatatggattaagagataagacagagggtaatgcagtagcacttgcgaatactcctgttatggataaactgatggcagagtatccgtttgtaaaaggaaatgcaagcggactttctgtaggtcttccggatggacagatgggtaactcagaagtaggacatatgaatatgggtgccggacgtatcatttatcaggaacttacaaagattacaaagtctatcgaagacggagaattctttgagaacaaagctcttcttgcagcttgtgagaatgtaaagaagaatgattctgcacttcacctgatgggacttgtatctgacggaggagttcatagtcatattactcatatttatggaattcttgagctcgccaagagacagggaatcgagaaagtatatgttcattgtttccttgacggccgtgatacaccaccggcatcaggtaaagagtatgtagagcagcttgaagcaaagatgaaagagattggtgtaggtgaagttgcatctgtatccggacgttactatgcaatggatcgtgataaccgttgggatcgtgtggagaaagcttacaaagcattagttgcaggagaaggcaatacagcagaatccgcaacagcaggaatccaggcttcctacgatgaagatgtaacagacgagttcgtagtaccatttgttgtaacaaaagacggtgctgcaacagcaacaatcaaagaaaatgattctgttgtattcttcaacttccgtcctgacagagcaagagagctcacaagaacattctgtgatgacagttttgacggatttgaaagaggagacagagtgaagactacatttgtatgcttcacagagtatgatgcgacaatcgagaataagatggttgcattcgtaaaagaatctattacgaatacatttggacagttccttgcagataacggactgaaacaggctcgtattgcagagacagagaaatatgctcacgtaacattcttcttcaatggtggagtagaagagccgaatgagggagaggacagaatccttgtgaaatcccctaaggttgctacttatgacctgaaaccggagatgagcgcttacgaagtatgtgacaagcttgttggagcaatcaagtctgagaactatgatgtgatcgtgatcaactttgcaaaccctgacatggtaggacatacaggtgttcaggaagctgcgatcaaggctgtagaagcagttgacgagtgtgtaggaaaggctgtagaggctctgaaagaagtagacggacagatgttcatctgcgctgaccacggaaatgcagagcagctgatcgacgaggagacaggtgagccattcacagctcatacaacaaatccggtaccgtttatccttgtaaatgctgatccggcttacaaattaagagaaggcggatgcctggcagacatcgctccgacactgatcgagctgatgggaatgcagcagccggctgagatgacaggaaaatctctgttagtgaaataattcataagtgttgaatttggattcaggcaacttgaatgattctttcaagagaaaagaatccagaagaaaattgcgtggattaagatagaagtgaaaagggaaagctattgactgcgataacaacagtgcttgttttagtttatcgtaattgatagctttccttttccctataggttgttgttcgcagtagatgtgtacagcaatgcctatagttcagagaggaaaggaaaagtcatgcgtgaaagattgacaaaaaatgatgtggaaaagattcaggcagagattgagcatcgaaaattagtagaacgtaaagaattgatcgaagcagtgaaagaagcaagatctcatggagacttgagtgagaacttcgaatatcacgcagcgaaaaaagcgaagaatcagaacgaaagtcgtattcgttatctggaaagaatgctcaagacagctgagattgtggaagatcattcgaaagaggatgaaattggcctgaataataccgtagaactttattgcgaagatgatgatgaagtcgaaacatatcgtatagtgacatctgtaagaggaagctctttgaatggactggtcagcatagaatctccgattggaaaagccctgctcggacataaagaaggcgagagagtctatattaaagtgaacgatgattttggctattatgtggtgattcgtaaagtgataaaaactgaaagtgaagaggatgatcagattcgtagcttctaaatcaagcaggttaacaagtggatattgaaaaagataatttgataatagcaaatgaggaaaagaagatgagaattagtaccgtattatttgacctggacggaacacttacagattcgggtcctggaattatgaattccgtaaaatatgcgctggagaaggtgggagaaccgacacctgacgtagatgaattacgtaaatttattggaccaccgctgaagggtcagtttatggaacactgtggaattgatgaagaaaaagcagcagagatggttactctttatcgagaatatttcacagtgacaggtatttttgaaaacagtgtgtatgatggcgtagaagagatgctcaagacattgaaacaagcgggaatcaagattgcgatggcgacatccaagccggaaaaatttgctaaaatcatcgcagatcactttgaactggctcaatattttgatgtgatcggcggggcatgtatggatgagacacgtacagaaaaacaagatgttatccgttatgtcttggaacagtgcgaagagaaagaactggataaaatcgtaatggtcggagatcgttcatatgatgtagttggaggtcatgcggaaggtctgaaagtgatcggtgttctatacggatatggagatttaaaagaactttcagaagcaggagcagatgctctggcaacaacaccacaggaagtggccgaattggtaattggttctggaaagcgaataaagtaaatcgatttaacaatagtttgatttattttacatagatttagcattggaagaaaatgagactttacaaataccctctatactaagaattgtcaaaaggaaaaacacttagacatttttagtagaaagagggtaatttttatgtatggaaaactttggagttttgtaaatcattatatagatgcaggtcatgcacttgcagtatatctgccaattttaattataggatggacaatcattggaacactgtttggattaggagtatgttctgcaatcagaatagatctgatacagagtctggcagatatcctctgtgcaggaggatacgcaggaatttttctgggtcttttcgggggaatcctttacttgtatcgtaaataaagatttatcgtagggattctttttcgagttcggacgaaaacagagaatatgattttagatagttgattgttagaagatgggtataggaacgccgactcagggttacgcatactgttcatactaagaaaaacaatagactgctaaaagcaaagaaaggattgacaaactcgctgccgctcagacagctgtcaatcctttctttgacgcagtctattgtttttcaagtatgagcaagcatgctccacattcatctgcgtccctatacccaccttctaacataaagctcctcgaagcttatattttctgttttctgtttattaaaaaatcgattccaacgctaaattttattaggtgcaaaaacgtttgagatatggatatcattctatagaatttccgttgcgcctacctctcaagtagagttcttctttcgaggaagtagaaatctgatatcgctgaaaacttaccgatagacaaacatcgagggtttgattcaggtgactgttctgtgtgcttggaaagacttaaaaaacgaaagattacgttgaagcaatgcgaggcagctgtctgaagcggcagcgagtttgccgagcattgttttgtttttagtaatctttcgtttttcttagtctttcctgtatacagaacccggagcctgcatcaaaccctcgatgtctgtctattcgaataaactttacatgcgatatctgatttcgtccgaactcgaaaaagaatccctacgtcaaatctttatttctccagatttttaaacgccgttgacagcatcagtttaatacgattcaactgatttacttcacttgcgcccggatcgaaatcgattgctacgatgttggattcagggtgcctgcggcggagttctttgataactcccttacctacaacatggtttggcaggcaggcgaatggctgggtgcagacaatatttccggcaccgctgtgaatgagttcgagcatctcaccggtcaggaaccatccttcaccggtctggtttccgagagatacgatctctgaagccatttttgcaagatcttcaatgtgagccggcggatcaaagtgtttactttctgcaaatgctttggaagccggagcacggaaccattccagagctttgattccaagatttcctgctgtcgctttggacttcttcattcccagatgggaaactttgaagttctgattgtagaagcagtagagcaggaagtcgagaagatccggaacaactgcttcggcgccttcactttccagaagctctgccagatgattgttggcagccggaaggaatttaacaaggatttctccaacgattccaacacgtggcttcttgatatcaagtgtctcgatattatcaaaatcattgatgatctctttacaaagcttcttaaatctcttacgggatggatatccttcggacacaaacttcttaacaacttcagcccatttgcggtgaatcttatttgtagttcccggtacggcctcataaggacgcatacggtaaacgcatttcataaagatatctccgaatactgctgcgtagattccgcggagaaccagtgcaggagaaagtttgaatccaggattatcttccagtccacttaagttaagtgagataaccggaatatgctccatgccggctttcttaagtgcacgacggataaatccgatatagttcgaagcacggcagccaccaccagtttgtgtgatgataacagctgtatgattcaagtcatattttccggataacagtgcatccatgatctgaccgacaacgatcagagaagggtagcaggcatcgttatttacatattttaatcccatatcgacagcctgtttgttatcgttaggaagaacatcgatgttgtatccggcagcgcggaaagcaggctcaagtagttcaaaatgaaccggagacatctgcggacagagaattgtataatccttacgcatttcttttgtaaatgtaaccttttcgatagaagccggacgaatggtacgtttttcctgtttcttttcacgcacacggattgcggcgagaagagagcgtacgcggattcttgcagctccaagattatttacttcatcaatcttcaaagttgtgtagatcttatctgaatttgtaaggatcgcagcaacctgatctgttgtaacagcatccagtccacatccgaaggagttgagttgaatcagatcaagattctctgttgtttttacataatttgcggcagcatacagtctggagtggtacatccactgatccataacattcagagggtgctctgccggattcaaatgagagacagagtcttctgtaagtactgcaatattgtaggatgtaatcaattcaggaagaccatgattcacctccggatcgatatggtatggacgaccggcaagtacgataccgcggtttcctgtttcatttaagaaacggattgtttcttcccctttatttctcatatcctgacgacaggcagcaagttcattccatgcgtcatggactgctgacttgatttcgctttcggaaagagagaacttcttacttaattcttctacaagacgataagaaatcgtctcttcactttcaaaattcaagaatggatggataaaatcaacttctccgttgacgatcgggtccatgttattcttgatgttttccggataagaagtaacgatcggacagttgtagtgattatcagaatcagcaaattctttccgctcatacgggattgacggatagaaaatgtgtttcactccctgattgatcagccactgtacatgtccgtgcgccagtttcgccggataacactcggattcacttggaatagattcaataccaagttcataaacctttcttgtggaagctggtgacagaacaacacggaatccaagttttgtaaaaaatgtgaaccagaacggatagttctcatacatattcaatacgcgaggaataccgattaatccgtgttttgcctcttcttcggaaagcggttcataatcaaaatagcgatgtaatttatattcaaataaattcggcatctgattttttgatttctcttttccaagtccgcgctcacagcgatttcctgtgatgaatttacgtccaccactgaaatggttgatcgtcagacggcagttgtttgtacatccacgacattttgtcattgttgtggagtattcaagggaacggatgtcatcaatggaaagcattgttgtgccttcgcagtcaacataacgttcacgggcaatcagagctgcaccgaatgcacccatgattccggcaatgtctgggcggatcgcttcacagttcgcgattttctcaaagcttcgaagaactgcattattatagaaggtacctccctgaacaacaatatgattaccaagttcagatgcatcagatactttgattaccttgaacagggcattcttgataacagaataagcaagtccggctgaaatatcagcaacagacgccccctctttctgtgcctgttttactttggagttcataaatacagtacagcgtgttccgagatcgatcggattctgtgcataaagtgcttcgtgagcaaaatcctctacagaataattcagagattttgcaaatgtctcaatgaaagaaccgcatccggaagagcaggcttcgttcagctgaacactgtcgacagtctgatttttgattttgatacatttcatatcctgaccgccaatgtccagaatacagtctacatctggctcaaagaaggatgctgcataataatgagaaacagtttcaacttctccttcatcaagcatcagagcagctttgattagtgcttcgccgtatcctgtggaacaggaatgaacaatctctacaccctcagggagttgatcgtaaatatctttgatcgctgtgatcgttgtaccaagcggatccccgtcgttgttgtgatagaaggaataaagaagtgttccgtcttcaccaacgagagctgcttttgtagttgttgaaccggcatcgattccaagaaatgcttttcctttgtatgaggcaagatcttttaccggcacctgatgctttgcatggcgggaaataaattcctcgtaatcagcagttgttgcaaacagtggatccagacgttccacttcgaaatccatttggattttattctcgagacgattctgcatatcacgcagttccatcggagtatcttttttggaattcagtgcggaaccaatcgcagcaaacaaatgtgagtgatttggtgcgataatatgttcatcatccagttttaatgtgcggatgaatgcttctcttaattctgagaggaaatgaagtggacctcctaaaaatgcaacatgaccacggatcggttttccacaggcaagaccactgatggtctgattcacaacagcctggaaaatggatgcggcaaggtcttccttagcagcaccgtcattgatcagtggctggatatctgtcttggcaaatacaccgcagcgcgcagcgatagagtataatgctttgtaatttttagcgtattcattcagaccggaagcatctgtctgaagaagagatgccatctggtcaatgaaagaacctgtaccaccggcacagacaccattcatacgctgttctacatttccaccctcaaaataaatgatcttcgcatcttctccaccaagctcaattgctacatctgtctgaggagcgtaatcctgtagtgcagtggagactgcaattacctcctggacaaatggaacaccgagatgtttggcaagtgtcaggccaccgcttcctgtgatgacaggagaaacctggattggtccaagcttataaagcgcacggccgagcagatcggaaagcgtctcctggatattagcgaaatggcgctcataatcagagaagaggacttcattttcatcattaagaattgcaatttttactgttgtggaaccaatgtcgattcctaaagtatgtagattttttgcgttcataattaatatccccaatcttttgtaattcagttaatttgtcaaatttatatgagttactacctattaaatgcgtttgttagctcgcaataaataacattatacgacaagattctcaaaaagacaatggtcattgtagtgtagtaagtgtgaagaaatgagctgtaatatggcaaaatgtctaagtagaaaggaaaggaaaatatcatattcttgttaaaagtgtattaatataaaaacaatcgtttgacaaaacaagtcttcccttgtacaattactgctatacgaagatgtgagtgctgaccacacgtagtggacagtaatataaaatgaaaatagaaggagaatacaagttgaactggcttgataaattagaaaaaaaattaggtcgttttgcaataccgaatcttacggtgtatctgctggccgggtatgtgataggtttcgctatttattatttagcaccgggacttttaggatggcttacactggaaccggcatatattttaagaggacagatctggagaattatttcctgggtattgatcccaccaacaggaagtttgatttctttactgttcctagtattattgtactattctcttggttctgcacttgagagaacctggggaacattccgttataatgtatacattttttcaggaatactttttacagtgatcgcagtattcatactgtatggtgtgttttatcttatctatggaattgaacttccactttcaagcatcggattgatcagcacgaactacattacaatgtctatctttttggcatttgcttccatctatccggatatggaagttttactctattttattttaccgattaagatgaaatggatggctttcgtatatgtagcaatggcactgtattatttctttacaggaagtctcgcaacgaaagttgcgattgcggcatccttattgaactttgttatctttttcctgtccagcaggaatatgaagcgtttcagtccgaaagagcaggcgagaaaagcaaagtttaaacagcagacgagaccacatatgacttatgcgaatggggcaagacaccgttgtgcagtctgcggacgtacagaacttgatgatccgacattggagttccgtttctgttcaaaatgtaatggaaactatgagtattgccaggatcatttatttacacatgaacatgtaaagtagaaaatgagaattgtgtaacgcatatttctcatattttaccggagatgaggtatggcagtgcagtgtatcagatcagagttgcagccgaaagtgatacagtgcagcttcgctccaggtgtataggaactttatggttatattttttaaaggagagattgacttagtatgaaaaaaacaaaagtagtatgtacgatgggaccaaacacaaatgatagagaactgatgagaaaactcatccagaatggcatggatgtagctcgtttcaacttctctcatggtgatcatgaagaacagaagggtcgtatggatatgctcaaagagcttcgcgaggaagagcatgcaacgacagctattcttctggatacaaagggaccagagatccgtacaggtgttctgaaagacggaaagaagattaagcttgaaacagggaagacctttacacttactacagaagatattgttggtgatgagaataaagtatctatcacatataagggacttgcagaagatgtaagtgaaggaaagattattttgatcgatgatggtctgatcggactgaaagtaatcggaaaaacagacaaagaaattcattgtgagatcatcaacggtggtgaactcggagagaaaaagggcgttaatgtaccgggagtaccggtaagacttccggcaatcactgagaaagataaagaagatattaaatttggagcagagcaggggattgattttatcgctgcatctttcgtaagaaatgcagagtgtattcttgagatcaaggcatatctgaagtctctcggagctccttacattccgattatcgcaaagattgagaatgaagaaggaatcagcaatatcgatgagatcattcgtgcagcagatggtatcatggttgcccgtggagacctcggagttgagattccggcagaggaacttccatatcttcagaagatgatgatccagaaatgtaacgatcagttcaagacagttatcacagcaacacagatgctcgattctatgatgcgtaatccacgtccgacaagagctgaggtaacagacgttgcgaacgctgtatatgacggaacagatgctgtaatgctctcaggagagacagcacagggtaaatacccactcgaggcgcttcagatgatggttcatatcattgagcagacagagaaacaccttgattatgatagcatgcttgagaaagagcacggtcatttaagaggcggagtatccagtgcaatcggatattcatccgtactggcagcagcaaacctgaatgcaaaatgtattattacaccatctgtatcaggagcaacttcaagagttgtatccaacttaagaccaagacaggaaatccttggtgtaactccgaacgagagaacactgagaagaatgtctatttactggggcgtaagaccgctgaagtctcttgaagttgatacaacagaagatatctgtgaaaatgcgatcgaactggcacaggtaaaacagtatgttgagccgggagatgttgtagttatcacagctggaattccttcaacaaatgtaagcaaagagagaagctttacaagtaatatgatgagaattgtgacagtagattaaattagaaaaacttttaataagagccagaacagttaccgtgcgaggtgactgttctggctcttattaaatacaatcaatatattgacatccaacaatcaatactgtatagtgttcctgtaaagaactactaatcagagggatggtgctatggacgaaagtaaagcaattgaatatctgatgcattttggaatgtcccggcaggaagcaactgtttatcttcggctgatcgaagcaggaaagcagacggggtatgagattgcgagagatacaggaatctcaaggtcgaatgtgtatgcatcactggcagctctggttgagaaaggggctgcatatctggtagaagaggatgccaagcgatatattccggttcatgttcaggagttctgtggtaacagaattcgcagaatggaagaagaacagaagtggttggatatgaatcttacgggagaacagaaagaagaagaaggatatgttacgatcgatggtcaggaacatatttcagataagatccataatcttctggctaatgtggaagaaagagtgtattgttcctgttccggtgtctgtctggaacagttgaaaggacagttaaaggaactgacagaaaaaggaaaaaaggtagttcttgtgacagatcatccatttgaactttcaggggcaatcatttatgtgacgaaagaaaaaggaaatcagattggtttgatcacagattctaaatatgtactttcgggtgagtatggacaggagagcagaaacacttgtgtctattccggacagagaaatttcgttacgctgtttaaaacagcacttgcgaatgagatagaattaatcaaaatacgcgaaggagaaaatgaaaatgagtaagaaaccatttgtgacaaaagaacaggttgaagagattgtaaaaacatatccgactccgttccatctttatgatgagaaagggatccgcgagaatgcaaaagcattaaaggaagcatttgcatggaatccgggatataaagagtattttgctgtaaaggcaactccgaatccgttccttttacagatcttgaaagagtatggatgcggttgtgactgctcctcttatacagaactgcttatgtcagatgcagttggaattgatggtcatgatattatgttttcctctaatgatacaccggaggaagattttaaacttgctgataaacttggagcaatcatcaatctggatgatattacacatattgacttccttgagaagacaatcggacatattccggagacaatcagttgccgttataatccgggcggaatattcaagatcagtaatgatattatggataatccgggagattcaaagtatggaatgacaacagagcagatcacagaagcatttaagacactgaaggcaaaaggtgcaaaagaatttggtattcatgcattccttgccagcaatgcagtgacaaatgattattatccaatgcttgcaaaagttctttttgaacaggcagtacgtcttcagaaagaaacaggagtacatattaagtttattaatctttctggtggtattggaattccttacacacctgatcaggagccgaatgatatccgtgtgatcggagaaggtgtccgcaaggtttatgaagaagtacttgttccggcaggaatgggagatgttgcaatctacacagagcttggccgctttatgatgggaccttatggctgccttgtgacaaaagcaatccatgagaagaatacttataagaactacatcggagtagatgcgtgtgctgttaacctgatgcgcccggcaatgtatggagcatatcatcatattactgttcttggaaaagaagatgcaccgtgcgatcacaaatatgatgtaacaggttctctgtgtgaaaataatgataagtttgcaattgacagaatgcttccggaagttgatatgggagattaccttgtaatccatgatacgggtgcacatggtttctctatgggatataactataatggtaaattaaaatcagcagagctgctcctgaaagaagatggaagtgtacagatgattcgccgtgcagagacaccgaaagactattttgcaacatttgattgttttgaggttggaaagaaactttgcaaataaaaaacaaataaaatcataaaaaatagttgaaaaatgtgaccggatatggtaacataaaaaagctgattcggacaggaaagttttcttgtccgacagaataagccgctgtggcggaattggcagacgcacttgactcaaaatcaagcggttagtagccgtgccggttcgagtccggccagcggcatcgaacttaatctctgaatatcttacaaattcaatgtttgcaagatatccagagattttttatatattaggaaagtgctttcctaatatataaaaaacgctccgctaaggatgcgcactgcggcgtataatgtaagcgtcgcaagcggtctacgtttcccacttcggtccttgctaaacaagcgccactggcgcttagcaacgccgcaggcgcaagaatgtgcaatgcacattctttgttctttgtaattttacttttttccacgaccaacgagataatcaattgagactgtataataatcagcaagtttgatgaagacatcaataggaacgttgatttttccaagttcatatttagaatatgtagtctgtttgatgtagaggtatgcagcaacttctttctgcgttttatcattatcttctcgcaaatttcgtatgttttcgaatttcataatcccatccttgtaccttaaagccggtgtgcgaacttaaccggaagcaagctattattcacagtatccagtgaacaataatctgatctcttttgtatttttggattattatataaaagtcctgacacaactattgaattatagtcgtactacgactataattgataaaaacatgaagaaatgtgcgagaaatgagacagcataagaactaaggggaatgggagaaagtgatgaataaagaaaaaatagatgatatggattattatgaaaaatatctgttgaatgcgacgaaagaagaaagggattgctatataaaagaacatcccgattttatgaatgaatatccagtatcgtatgaacatcgggaactgcttcaggataagatttatcgtggattgatgcgtaagatccgggattatgaaaaaagtcgtgagcaataaaaaactgacagatcacaccagaaacagaatgaaattcttaatggacagaaaatgtttcgtgtggtttgtcagtttgttttaaataaacagagatgttaatcaagctttcttaaaatgttttttaattctgaaaaagaatgtatcgtcggataatcttccttaacatctccaagtccatattcagcaaagataaaaggaataccggcttttttgcaggaatcagcatcgccctgggtatctccgacatagacaggggatgtcaggttatttttctccattaatttcagaatcgtctggtctttggaagtctgcgtctggccaaaacaaaggaaatctttgatatatggttccatgcctgcgcctttcatcataacttcaatatatccgcactggcaattgcttacaataaaaagaggatattccagagccagctccttgagtgtgtccataacgccttcgtagtaaacaccgggatgtgtttcaagatagcggttttcataatcaaaacagatatccatcagttttcttcgagagtccggatcgagatcgggaaaaactccggcagcaatttcgtccattgtctttccaaacagtccctgaagaatttcacggtttaagtttggctcaagatcagagttctcttttattgcaagattccaggattcggctacaacttcaacagaatcccaaagtgttccatctacatcaaatataattccatccataataattctcctgatagtatttttgaaaatattgtttacaagatattggagtcaaaagtcctaaataatgataccataaaatgaacctttaaaaaagaagttaattagtgtatactttaataatggttaaaattaaatgcaacaaaaagcaagagataataggagagaatctgatgagagataaaattgtactgatcgatggacacagtatattgaaccgggcgttttatggagttccggatctgacgaattcggaaggactgcatacgaacgcagtttatggattcctgaatattatgtttaagatattagatgaagagaagccggaatatctgacggttacatttgatgtgcatgcgccgacatttcgccatgagatgtttgcagattataagggcacgagaaagccgatggcagaggaactgcgtcaacaggtgcctgtgatcaaggacgttctgcgtgcgatgcatatagaagtgattgaaaaggcaggacttgaggcggatgatcttttgggaaccttgtctcatcgttgtgaggagaaaggaatggatgtttccatcatttccggagaccgtgatacgcttcagcttgcgacagagcatattaaggtccgcatcccaaagacgaagcaggggaagacggaagtagaagattattatgcggcagatgtgcaggaacgctatggagtaacaccgaaggaatttattgatgtaaaggctttgatgggtgatactgctgataatattcctggtgttccgggagttggcgaaaagacagcgacaaagatcattcagcagtaccagacgattgaaaatgcatacgagcatgttgatgagctgaaaccgccaagagcaagcaagaatctgaaagaattctgggagcaggcacagcttagtaagacacttgcgacgattaaactggacgcagatattacctttgaacttgaaaatgccagacatgagaatccttatacaaaagaagctcatgaattattccaaagactggagtttaaaaatctgcttggaagatttgatgtagaagcgtcagtgaatgatgtggaaaaatattttcgtgaggtaacaggaaaagaagaaattgagaaagtctttaaagaggcggagaaagcagagaccgttggtgtggcattttccaaagatgctggaaatgttctcccattgtttgcacatgcttcaggatacggaagggtttctctttgctatgaagcagaaaagattgttacgattccttgtgatatggatgctgattttgaatatctgacaggaaagttgtctcaccttgcaaaaagtgtgaaacgtttttcaatgtgtggattgaaagaatatctggaatggctgccggagcttacaagtgagaacgggtttgatgcaatcgtagcagcatatcttctgaatcctctgaaaaatgattacaatgcagaagatgtggcaagagaacatttgaatcttttaattgatgaaaaacttgatgagggtacaaaatcatgttatgaggcatatacagcttatgcctgtgtcccggttcttgagaagaaactggaagagaatggaatgttctgtttgtttaatgaaattgaaatgccattagtatttacattgtatgatatggaacaggccggtgttaaggttgaaggtgaagagctgaagcgttacggagaagagcttggagcaagaatcgttgagctggaaaaagagatttatgaaatggcaggggaagagtttaatatcaattctccaaaacaacttggcgtgattctttttgaaaaactggaaatgcctcatgcaaagaagacaaagaccgggtattctacagcagcggatgtgttagataaacttgcaccggaatatcctatcgtagcaaagattctggagtatcgtcagcttgcaaaactgaagtcaacatatgcagacggacttgcaaattatatagggatggatggaagaatccacagtaaattcaatcagacgatcacggcaaccggacgtatcagcagtacagaaccgaatctgcagaatataccggttcgtatggagcttggacgtctgatccgtaaagtatttgtaccaaaagaaggctgtgtctttgtggatgcggattattctcagatcgagcttcgtattctggcgcattgttccggtgatgaacagctgatccaggcatatcgtgaagcgagagatattcaccgaatgacagcttcccaggtattccatgtaccatttgatgaagtgacagatctgcagagaagaaatgcaaaagcagttaatttcggcattgtgtatggaatcagttcttttggactgagccaggatctgagtatttcgagaaaagaggcggcacagtatatcgagcattattttgaatcctacccgggaattaagacatttcttgataaatgtgtgagcgatgcgaaagaaaaaggatatgcagagactttatatggaagaagaagaccgatgccggaattaaaatccagcaattttatgcagagaagttttggagagcgtgtggcaatgaatgcaccgatccagggaactgctgcagatattattaaaatagcaatgattcatgtaaatgaagaactgaagaagagaaatctgaaatcacggatgatccttcaggtgcatgatgaacttttgatcgaagcagatgaaacagaattagaagaagtacagcagatccttcaggataagatggaacacgcagcagaattgttagttccgcttagtgtagatatgcatacagggaagaactggtatgaggcaaaataagatgaaagtaattggaatcacgggtggagttggctccggaaaaagtgaaattttaaaatttcttgaacaggaatacggtgcggtagtctgccagatggatgaagttgcaaagcagatccagaagaaagggacgcgggcattcacgagaatcgtacaggaatttggtgaacagattgtcggagcagatggtgaattggatcgcatgaaacttggaagctgcgtatttgcagatgagaagaaattacaaagattgaatgatattgtacatccagaagtgctggaatgggttcggaaagatatcttgaagaaaaaagaagagtgttgttcttattatattgtagaagcagcacttcttccggaagttgggaaggaactgtgcgatgaattatggtatatttacacagatgaagcggttcggagagaacgactgaaaagttccagacattatacggatgaaaagatcaccaggatgattgcttcacaaccggtagaagaagtatttcgaaaggcatgcacagttgtaattgataatagtggagactttgaagcaacaaagagacaaataggagatagattgaacaaatgagaatgtgcagtattgcaagcggcagcagtggaaactgtatctatgtaggaagtgataattcccatcttctgattgatacggggattagtaagaaacgaattgaagaaggtctgaataagttggagattaaaggggacgaactcgatggaattctgatcacacatgaacattcggatcatattaagggacttggtgtgttcagcagaaagtacgagataccaatttatgcgactccgggaacgattgcaggaatcaaagagtcttccagtcttggaaagatgccggaaggacttttacatccgattaagacagatcatccatttcggcttggtgaactggacgtacacccatttgctatttcccatgatgcaaatgaaccgtccggatatcgtattgaacaaggtgggaagtccgtagcagttgcaacagatcttggaaaatatgatgattatacagtgaagaatctgaaaaatctggatgcgatccttctggaagcaaaccatgatatccatatgctggaagtcggaggatatccatattatttgaagcagagaattcttggcgatcgcggtcatttatcaaatgaattgtcaggacagcttctttgtgatatactacatgataatctgaaacacatcatgcttggtcatctgagcaaggagaacaattacgcaagacttgcttatgagacagtgaagttggaagttacgcttgcagataatgaatataaaggggaagacctgaatatgttcgttgcaagccgggaatcggtttcggatattattaatgtataaaattgagtgaatcaaagcggaggtacagaaagaatgaagaaatgtattgtcacagtacttggaaaagacacagtaggaattattgcaaaagtatgtacatatcttgcaggaaatgaaatcaatattcttgatatttcacagacaattgttcagggatattttaacatgatgatgattgtggatgttgcgaatctgaagaaagatttcaaagaagtttgtgatgagatggatgtacttggcaaagagatcggtgtaacaattcattgtcagagagaagagatttttgagaaaatgcaccgtctgtaagaagtcggagataaggtgaggataagactatgattaatatgtatgaagtatcagaaaccaataagatgatcgaaagcgagaaccttgatgtccgcacgatcactcttggaatcagtctgttggactgtgtggattctgatctgaatgaactgaaccgtaagatttatgagaagattacaacagttgcaaaagatcttgtatctacaggaaaagacattgagaaagaattcggaattccgatcgtaaataagagaatttcaattacacctgtatcgcttgttggagcagcagcgtgtaagactccggaagattatgtgacaatcgcacgtacacttgaccgcgcagcggaaaaagtaggtgtaaacttcattggcggatactccgcgcttgtgtcgaaaggaatgacaccaagtgaagagaatctgatccgttcaatcccgcaggcactggccgagacagagagaatctgtagttccgtcaatgtgggatcaacaaagacaggtatcaatatggatgcagtccgtctgtgtggacagattgtgaaagaagcggcagaggcaacgaaagacagagattctcttggttgtgcaaagcttgttattctttgcaatgcaccggatgataacccgtttatggcaggtgcattcctcggtgtaactgaggcagatacgattattaatgtaggtgtcagcggaccgggagttgtaaagaaagcgattgaaaaagcacgtggaaaaggttttgaagaactctgtgaaacaattaagaaaacagcgtttaagattacacgagtaggacagcttgttgcaggagaggcttctgcacgtcttggaattccatttggaatcattgatctttctcttgctccgactccggcagttggagatagtattgcagagatcctggaggaaatcggactggagcgcgttggtgcacctggaacaacagcagcacttgcaatgctcaatgaccaggtgaagaagggcggcgttatggcatcttcttatgtaggtggactcagcggtgcatttattccggtcagtgaagatcagggaatgattgatgcagtaaatgcaggatctcttacacttgagaagttagaggcaatgacatgcgtatgctctgtaggacttgacatgatcgcaatccctggaaagacatcagcagcgacaatctctggaatcattgcagatgagatggcaattggtatggtcaaccagaagacgacagcagtgcgtctgattccggtcatcggtaaagatgttggagacgtggcagaatttggtggactgttaggttatgcaccgattatgccggtgaatgaatttggatgtgatgcgtttatcaacagacagggacgtattccggcgccgattcatagttttaagaattaacgagggagaaatttgatgagtaaagttgcaattgtaacggatagtaatagcggtataacacaggaacagggaaaagaacttgggatttttgttcttccgatgccattttttatcgatggagaactttatctggaggatatcacactttcccagagtgaattttatgaaaaactcggagcagattccgatatttcaacatcacagccatccccgggagaggtcatggatctctgggataaagttctggaagaatatgatgagcttgtatgtattccgatgtccagtagcttgagcagcacatgtgcaacagcaattactcttgcagctgaatatgacggacgtgtccaggtggttgataatcagagaatttcagttacacaggagcagtctgttctggatgcaatgaatctgcgtgaagaaggaaagagtgcagcagagatcaaagaaatactggagaaagaaaaacttcaggcaagcatttatattacggtggatactttaaaatacctgaaaaaaggtggaagaatcacaccggcagcagcggcaatcggaactgtgctgaacttaaagcctgttcttcagatccagggagaaaagctggacgcattttcgaaagcaagaggctggaaaacggcgaagaagacaatgctcaatgcaatcgagaaagatctgaagggacgttttgccgatgttaaggatcagatggctcttggtatggcttacacatgcagtaaagaagaaacacaggagtggaaagcagagatcgaagaaagatttccgggatatgagattatggaaggaccattgtcattgagtgtggcctgccatattggtccgggggcactggcgattacttgcatgaagagattgtaaactggtaactgtgacgaaatgcgtagcattttggaaattggttctgaacagttacataatctgtattggtgagaggtggtactgttcacacgtggtgtgagcagtactctgcttttttaggagaatattatgaaaatcgttggtcttattacagaatataatccatttcacaatggacatctttatcacattaaagaatctttgcgtgtaaccggtgcagatgcagccgttgttgttatgagtggtgactatgtgcagcggggaacacctgcaatcatgcctaaaaggatacgtgcagagatggcactgatgtgtggtgctggagctgtctttgaacttccggtctgttatgcgacgggatctgcggagctttttgcacttggatccgtatctcttttagagtctcttggaattgttgattctatctgttttggcagtgaatgtgatgatctcccaatcttggaacagcttgcagaactacttcttgaagaacctgaagcctaccagattctgttgaaagattatctgaaacaagggatgtcttttccacgcgccagacaggaagcaattctttcttatacagaagattctcggtttgcagagattttaagaaatccgaacaatattttggggattgaatatttgaaagcaatcaaaaaacttggaagcaggatggaaccttatacgattgcaagacgtggtgcacagtatcatgatgaagaactggacagtgattacagttccgctacggcaattcgttcactgcttgcttattcaagttcatctttcaatacagaaccagtagaaggaaattacgatgagctttcgttttcgggaatactgtcagagttggaaaaccaggttccaaaatgttgtctggaacttttgaaggattatcataaagtacagtatccgatttcacagaatgatttttctctgattttgaaatataaactgttaaataaacagccagaaagtctggttcgatatgtggatgtctctccggagattgcatccagaattgcgaatcagttaaacaacttttttaattataaacagttctgtgatttgttaaaaacacgagaacttacgcagacccgagttaaccgggcattgcttcatattatgcttggaacgaaaaaggcaaatgtggaagaatatattgacaatggctatcatatgtatgcacgtctgcttggttttcgaaaagacaatgcaaagcttttgacagctatgtcgaaggaaagcagtcttccggttttgacgaaaatgtctgaaattgacgatcttccggaacttggtcagaaaatgctcagacatgatatgcttgcttcaaatctgtatacctcagtggtgacagataagtttaagacggcgtttcagaatgaatataagcaaggggttttgaaggtgtaaattttaataagagccagaacagttgccgtgagaggtgactgttctggctcgcaatgttcttagaaaaagacaatgtttgataaaattgtaacaatcttacaaatatcctattacaaagttcggattgtatttgaaaatgcacataaaatgacttgtatacaaaaaacgattgagttataataggactaagtgagataaaaagaaaggtggcattaaatcatgggatttattgatgaaatcaaagcaagagcgaaagcttgcaaaaagacaatcgttcttccggagacagaggacgaaagaacttacaaagcagcagagacagtactgaaagaaggactcgctgatctggtgcttgtaggaagcaaagaggagattgagaagaacaaaggtacatacgacatctccggtgcaacaatcgtagatcctgcaacagatgcaagaacagaaggatatattgcaaaacttgttgagttaagacagaaaaagggaatgactcctgagcaggcaaaagaactgcttcttagcaattacttatactatggtgtaatgatggttaagatgggtgatgcagacggaatggtatccggagcatgccactctacagcagatacacttcgtccatgccttcagattctgaagacaaaaccgggaacaaagctcgtatccgcattcttccttatggtagtaccgaactgcgacatgggagcaaatggaacatttatctttgctgatgcaggacttgagcagaatccagatccggagaaacttgcgaacatcgctatttcatccgcagattctttcaaactgcttgttgagaaagagccagttgttgctatgctttctcactcaacaaagggaagtgctaagcatgcagatgtagataaagttgttgaggcaacaaagatcgctcaggaactcgcaccagagcttgctcttgacggagaacttcagcttgatgcagctatcgttccatccgtcggggaatctaaagcaccgggaagtaaggttgcaggacatgctaacgtacttgtattcccagaccttgatgctggtaatattggatacaaacttgttcagagacttgctaaagcagaagcttacggtcctctgacacagggaatcgccgctccggttaacgacctttcccgtggatgcagcgctgaagatatcgtaggcgttgtagctatcacagctgtacaggcacaggctgaataattgtaattgtttacagattttttaaaatagttacgggtaatcaaaagaaacaaagagggtagtgtgagctgccctcggataataataataaggttttttcaggaggaaaaaagaaaatgaacgtattagtaatcaactgcggaagctcatctctgaaattccagctgatcaacgctgagacagagaaggtacttgcaaaaggactttgtgagagaattggaatcgacggacgtctgacatatcagccggctggcggagagaaagagaaatctgatctggctatgccaactcatacagaagcaattcagtttgtaattgatgctttgacaaatgagaagacaggagttgttaagagtcttgatgagatcggagcagttggacaccgtctcgtacatggtggagagaagtttgcttcatctgtagtaatcacagacgaagtaaagaaagcagtagaagagtgtaatgatcttgcaccacttcataacccggcaaacttgatcggtgttgcagcatgtgagaaattgatgccaggaacacctatggttgcagtatttgatacagctttccatcagacaatgccggagaaggcttatatgtatggacttccatatgagtactatgagaaatacaaagtaagacgttacggtttccacggaacaagccacagcttcgtatctaagagagcagcagaagtaatgggaaaatcttacgatgaagtaaagacaattgtatgccacctcggaaatggatccagtgtaagtgctgttcttaacggaaaatgtgtagatacttctatgggacttactccacttgaaggacttgtaatgggaacacgttcaggtgatatcgatcctgcaatcatggagttcattgctaagaaagagaaccttgacattgaaggtgttatggaagtactgaacaaaaagtctggtgtatttggaatttcaggcggactttcaagtgatttccgtgacctgacagacgctatgaatgccggagataagaaagctaagatcgctatggatgtattctcatacagagtagcaaaatacatcggatcttacgctgcagctatgaatggtgtagatgacatcgtatttacagctggtatcggtgagaacgatgattatgtaagagaagaagtatgtaaataccttggataccttggagtagacttcgattcagaagtgaataaaggactcagaggaaaagaagctgagcttacaaaagaaggatcaaaggttaaagtattcgttattcctacaaacgaagagcttgcaatcgcccgtgagacattagcgcttgtaaaataattgaagaaatcttaatttgagaaagtgtatacgatagtgatctgtaaagattatatcgtatatgagcgcaggactgaggtgccaagagagcagttcagtcctgcttttgcgcatagaagaaacaaaaatgtatccaatacattttgctcttcataatatttttgatagaaattataaatatctgttgacaaacattttttccatgatataatagtttaggtatgaataggagaaatacattatgttgattaacctatcagacgttttgtcagaccagcataagacggttgaagaaactgtgcggctggagatggaagagatccggttacaatccggaacctaccccattatcagcaaggagccggttcatgttaaagtagagcatataaggggaaaagaactgctcatcacagctgagaccagattgagtgtcataattccatgtgaccgttgtctggaggatgtgaaacgggagtttgaactgaattgtgtgaaacatgtggacgtaggcctctccgacgcagaactgacagaggagctggatgaatcaaactttattgacggatatcatcttgacgtggacaaactgctctttcatgagattttgtcgagctggccgacgaaagtactttgcagggaagactgcaagggattatgcaatgtatgcggtcagaatttaaatacggggtcttgtaactgtgaagatacagggcttgatccgagaatgtcagttgtccgtgacttatttaagaattttaaggaggtgtaacctatgtcaatctgtccaaagaataaatcttcaaaagcaagaagagataaaagaagagctaactggaagatgagcgcaccgaatctggtgaaatgcagcaagtgcggcgagcttatgatgccacaccgtgtatgtaaggcgtgtggatcttacaacaagcgcgagatcgtttcagttgactaatgatcaataagatattgagtgtactgcgaacagaacacttgagggcgtaaaaactttgtgttttacgcctttttttattgatttttatactgatatccagtagaataatttcagtagcgcaaggaggaaatgatatgtcagagattacaagggttgctcttgatgccatgggtggagacaatgcaccaagagagattgtaaaaggtgccgtagaggcagtgcggaagagaaaagatatcaaggtactgctgacaggtaaggaagatgtgattcgcaaggaactctccgcttatacgtatcctgaggagcagattgagattgtgaatgctacagaggttattgagacggcagaacctccagtgaaagcaatccgtggtaagaaagattcatccattgttgttgcgatgaagatggtgaagaaaggggaagcagatgcttttgtatctgcaggaagttcaggagctgttcttgttggaggacaggttcttgtaggcaggatcaaaggtgttgaaagaccaccgcttgcaccactgattcctacattaaaaggtgtttcacttttgatcgattgtggagctaatgtagacgcacgcccatctcacctggtacagtttgcaaagatgggatccatttatatggaaagcgttatgggaaagaagaatccgacagttggtatcgtgaatatcggtgctgaagaagagaagggaaatgcgctggtgaaagagacattcccactgttaaaagaatgtcctgacatcaatttcattggaagtgttgaggcacgagatattccttacggagcagcagatgtcattgtctgtgaagcatttgcaggtaatattattctgaagctttatgagggtgttgcaggagcactgcttaagaaagtgaagaaaggaatgctttcttctttgcgtagtaagataggggcactgcttgtgaaacctgctttaaagggcgtactgaaagattttgatacaagtgagtatggcggcgcaccgcttcttggcctgaacggacttgtagtaaagacacatggaagttcaaagtcaaaggaggtatgcaactcaatcattcagtgtgttgcatttaaggagcagaagatcaatgagaagataaaagaggcaattcaacaggagaccctggaagaaaagaaagaagtcgaataagacaggaggagttttacaatgacagaatttgaaaaactgcaggcaattattgcggacgtacttaatgtttcaccggagacaatcacaccggatactacattcgtagatgatcttggagctgactctctggatattttccagatcattatgggaattgaagaagattttgacatcgagatcgataacgaagaggcagagaagatcacaacagtgcaggatgctgttgatcagatccagaaaaagaaggctaatgaataatcagatagtgagatgaaaaagcccgtttgggctttttcgtttattaacacgaaggaggccatttaaatggacagagtaaaagaactggaacaaaagatcggatatgtgtttaaagacaaaagcctgattgaacgtgcattgatgcatagttcttatacaaatgagaaacatttgaagaaatatgagtgtaatgaacgcctggagtttcttggagatgcagtattggaattggtatcaagtgcttatttatttaatgaatttccaaaggtatctgagggagaactgacaaagacacgtgcaagtatggtatgtgaaccgtctctggcaatgtgtgcaagagatatcggacttggagattacttgcttcttggaaaaggagaagaggcgaccggtggaagaaaaagagattctatcacatctgatgcgatggaagcattaatcggtgctatctatctcgacggtggttttactaatgcaaaagagtttatccatcattttattttgacagatttagaggataaaaaactcttttatgatagtaaaacgatcttacaggagatcgtgcaggcgaatatgacggggaatgtaagttatgaactgattgatgaacagggaccggatcataataagattttcgaagtggaagcaagaatcgggggaaaagcctggggacgtggaaaaggaagctcgaagaagtcagcagaacagcaggcagcttatgaggcaatcctgaatctcagaaagaaaaagtaaagaggactttatgtatttaaagagtatagaagtgcagggattcaaatcttttgccaataagattaaatttgaatttcataacggaattacaggtattgtaggaccgaatggaagtggtaagagtaatgtcgctgacgctgtccgctgggttcttggagagcagagagtgaagcagctgcgtggaggcaccatgcaggatgtaattttctcgggaaccgagaaccggaagccgcttagttatgcttcggttgcaatcacactggataattcagatcataaacttccggtagagtacgaagaagtcactgttacacgtaaattgtacagatccggagagagtgagtatctgatcaatggttcagcctgcagactgaaagatatcaatgagatgttctatgatacaggtatcggtaaagaaggctattcgattatcggtcagggacagattgataagatcttaagcggtaagccggaagagagaagagaactttttgatgaggccgccggaattgtaaaatataagagaagaaagtccctttctttgaaaaagctggaggatgaacggcagaatcttacccgtgtgaatgatattcttgcagagcttgagaaacagatcggtcccttggaaagacagtcagagacagccagaatctatctgaagatgaaagaagaattaaaaacatatgacattaatatgtttttgctggaggaagagcggctacaggagcgtattcgtgaagtcggtgggaaatatgagattgcttctcaggagatgcaggaatcaaatgcccgttatgagaagatgaaagcagaatacgaggcaatcgaggaagaagtagatcagattgatcttgcaattgaaactgcgaagaaccagatgaatgagacgaatcttttaaagcaacagctggaaggccagatcaatgtcctgaaagagcagattaatacagcccgtatgaatgatgagcattatgatcatcgcctgagtacgatcgtcagtgagatagatacaaggcagcagcagaaaagagagcttgaagaagagaagaaaagaatttcagaacagttagaatcagccagtggacaggatacggaagcacagcagagtttaattgagattcagtcaaagattgcagaacacagtactgaaattgagcagaagaaacgggagatcatggatctgcttggaaatcgtgcttcaacaaaagctaagattcagcattttgatacgacgaaagaacagatccagacacggaaggctgtcgttgccagaaatattcttgagatttcgacggtagcagaaggacagaacaacagacttaagaagtatgaagaagaacttggtcagatccgtgagcgcattcaaacctatcaggataagatttccctgaacgaacaggaacttggcaagcttcagaatgagctgaaagagaagcaggaaaagttacggatcggacagaccgcttatcacagagagtcttcccgtctggagtcattaaagaatattacagagcgctatgacggatatggtaacagtatccgaaaggtaatgtcgaataaagaacgtgagaaaggtctgatcggtgttgtagcggatatcattaaggtcgataaggaatatgagatcgctattgagacagcgcttggaggaagtattcagaatattgttacagataatgaagatacagccaagcgtatgattgatttccttaagcgtaataaattcggaagggcaacatttcttccgctgacaagtatgcatggcggcggaggaatcaggaatccggaagcactcaaagagccgggcgtgatcggacttgcgaatacattgatccatgtggaatcaagatttgacggactggcagatcagctgcttggacgcacgattgtagtagaccatattgatcacggaatcgcaattgcgagaaaataccgccagtctctgcgtctggtcacattggaaggtgacctgatcaatccgggcggatccatgacaggtggtgcatttaagaattcaagtaatctgctgagcagacgccgcgaaatcgaagaatttgaaaagacggttgctatgctcaagtctgacatggatgtgctggaaaaagaagttacagaggcgaagaaccgtcgtgcagcatgctatagtgtaatcgatgaagtacaggaacatttaagagaagaatcggtgctggagaatactgcacgaatgaatgttgcgcaggtacagagagaacagttagaatcaaaacagcgttacgaaggatttctgaaagaacagaaagcattgcttcaggagttggatgaaatcaatgagaatgaagattctatccagatggaacttgagacatcagagaagttggaaaaagaactgaatgaacagattgaagctttgcagatgcagttggagaaagaaagagaggatgaggctgtccagatgaaacagtctgaggaagtccatctctcactggcaggcctggatcagcagaaaacctttattgtagaaaatatttcccgtatagatgaggaaatcaccagatatgaaaaagagcaggaagaacttgccgaaaatcgtggagatgtatctgaggaaattctgcaaaaagaaaatgaaatcgaaggactcaggaaaacgattgaagattcaaaagaactgtttatagagattggtgaagagattaaagtacagagtaaaaaacgcgaagaactgaatcagaagcacagagatttcttacgacagagagaagaacttgcaaagcatgtgtcagatcttgataaagaatgtttccgtctgaacagccagaaagaaggctatgaggaagcgtcagagaagcagatgaattatatgtgggaagagtatgaactcacttacaatcatgcgaaagaacttcgtaatgagacactgacagatctggcattgatgaagaaaaagatccaggaacttaagaatgagatccgaaagcttggttcggtcaatgtcaatgcaattgaggattacaaaaatgtatccgagcgttatacattcttaaaaggtcagcatgatgatcttgtagaggcagaagcatctcttgaacagattatcgaagaattggatgtggcgatgcgcaagcagtttacagaacagtttgcaagaattgcgacagagttcaatgatgtatttcgtcagctttttggaggcggaaagggatcattggaattacaggaggatgtggatattcttgaggcaggaatacgcatcatcgcacagccacctggaaagaaactgcagaatatgatgcagctttcaggtggagagaaggcgctgactgcaattgcattactatttgcaatccagaatctgaagccatctccgttctgtctccttgatgagattgaagcggcactggatgacaacaatgtagatcgttatgcgaaatatttacataagctgacaaaatatacacagttcattgtcattacccacagacgtggtacaatggcagcagcagaccggttgtatggaattaccatgcaggaaaaaggggtatccacacttgtttcagtggatctgttggaagatgatctggaaaaataaacctgtttttattgtaaacagggtattaagagaacaggaggctgaaaatgggagaagaaaaaaagggattttttaaacgacttgtatccggtctgacaaagacaagagataatattgtgtccggcatggacagtattttccatggattttcaaagattgatgatgacttttatgaagaactggaagaaactctgatcatgggagatcttggtgtcagagcaacaatggacattattgaagatttaaaggttaaagtaaaagagcaacatatcaaggaaccgattgaatgtagacagcttgtgattgacagtattcgtgaacagatggatgtcggagagacagcatatgagtttgagaatcgtcagagtgtggttttcgtgatcggagtaaatggtgttggtaaaacaacaacgatcggtaaacttgcaggaaagctgaaagcacagaataagaaagtgatccttgcggcagcggacacattccgtgcggctgcaggagagcagttaaaagaatggtccaatcgtgccggtgttgagatgatcggcggtcaggaaggtgcagatccggcatcagttgtatatgatgcggttgctgctgcgaaagcgagaagggcagatgtacttctgtgcgatacagccggaagacttcacaataagaagaacctgatggaagagcttaagaagatcaatcgtgtgattgacagagagtatccggatgcgttccgtgagacgctggttgtgctggatgcaacgacaggacagaatgcacttgcccaggcaaaggaattcaatgaagtaacggatataacaggaattgttctgacaaagatggatggaacagccaaaggaggaattgcagtagcaatccagtctgaacttggtatcccggtaaaatatatcggtgtaggagaaacaattgatgacttgcagaaatttgactcagaggagttcgtaaacgcgttgttttacagagaggaagaaagaccatgatgacattagagaaatttgaagaagctagcgaactggtaaaaaaggtaacaaatcctacaaaactcatttacagtgaatacttaagtgcacagacaggagcaaaggtttatttaaaaccggaaaatatgcagcacacaggagcttataagatccgtggtgcatattacaagatcagcacactgacagacgaagaaagaagccgtggactgatcacagcatcagcaggaaatcatgcacagggcgttgcatttgcagcaaaacagtttggatgcaaagctacgattgttatgcctacagttacaccgctgatcaaagtaaaccgtacaaaaagctttggagcagacgtagtacttcatggtgatgtttatgatgatgcttacgcatatgcatgtaaacttgcagaagagaacggatatacattcgttcatccgtttaatgaccttgatgttgctacaggacagggaacaatcgcaatggagattgttcaggaactcccgactgtagattatatccttgcaccaatcggtggaggcggactgatcacaggtatttccacacttgccaagatgctgaatccaaagatcaaagtaatcggtgtagagccgtcagaagcggccagtatgacagcagccctgaaagcaggagagcctgtagaacttccatctgcaaatacaatcgcagacggaacagctgtaaaagaagttggagataaagttgttccttatgtgaaagagaatgtagatgatattcttctcgtagatgatgatgagctgatcggtgcattccttgacatggtagaaaaccataagatgatcgtagaaaattcaggacttctttccgtagctgcattaaagcagatggacatcaaaggaaagaaagtagtctgtgtattaagtggtggaaatatggatgttatcacaatgtcctcgatcgtccagcacggattgatccagagagaccgtatcttctccgtatccgtactccttccggataagccgggtgaactcgcacgtgtggcgcagacagtcgcagacgtacagggtaacatcattaagctggagcataaccagtttgtaagcacaaacagaaacgcagcagtagagcttcgtatcacaatggaagcattcggaacagatcataagaagaagattctggatacacttgataagtctggattcagaccaaaactgatcagtgcgaagctgtactaatgggtgtgtgtttgttgaacttggattttgagagttgaaataatcagttttgcaggaaaagggaacgcaaggccagccctgctattaccacaagcactggcctgctttacctcatccctttgaaagtatgtaacataagagccagaacagttaccgtgtgtggtgcctgttctggctcttactaacatactgaacaaagtgtattcggaacgctcctgccttacatgtgctcgtggcaacagcaggactgtccttgcttacatattccaaatgggatatttaattccaatcagacaaatccagaaaacaaatcacagaatctgtagataaacgtaaacggatgttttatcgactaagataatcgtcccctttttacgcacgtactaagtttgtattttgttttctggattcgttccacttggaacaggtactactcatttgaaaaaccgagtgagggagccattgtattgttgaggacacatttaaggcaggagcgttccgaatacactttgcagaatctgttagaaaaagccagacacgaatcacacacggtgagtgctctggctttttcgttacagattgtcaaagggatgaggtaaagcgggccggtgtccgatgcaatacaatggctccctcacgtctgtttttattaaaaagtacttatttgagtgataatgaatccaagttcaacaaattacaacatccctataaaacgatggaatgcctccagtcctttttcattacacttataaactccggcatcttcgagtacttcgcagaatacttttccgacttcctgctgaaggatctcttcaacattctcctctgtgatggatgtgtaattcggaaggaattcatctacccagtcagcgtgttttgcaatctgttcattgctgcggatatcttttcctgtcaagatgtaatctttcagaagttccatctctccttttaatcttgcagggagaacagcaagtcccattacttcgataagaccgatgttttctttcttaatatggtgcagtttagcatgtggatggtagacaccaagcggatgttcttctgtggtgatattatttctcaatgtcaggtcgagttcgtagagatctccacgctttcttgcaatcggtgtgatcgtgttgtgcggtgtaccgtctgtctcagcgaagatgaaagcatcttcatctgtataagatctccatgcatttaaaatgtgttcagccagatcaatcagaggttttacttctttgctctgaagacggataacagacagaggccattttacgataccggcagttacatcttcgtaacctttcacagtgaagtgttcaatgatcggagctttagccattgcgaaagtataatttccaccctggaaatgatcgtggcttaagatagaaccgccaacgatcggaaggtctgcattggatcccaggaagtagtgtgggaaaagtttgatgaaatcaaaaagcttttcgaaagcgttgcggtcgatcttcattggaacatgctgtccgttgaatacgatgcagtgctcgttatagtatacataaggggagtactggaatccccaagggttatcctgaattgtgatcgggatgattctgtggttctcacgagccggatgatcaaggcgtcctgcatatccttcgttttccatacagagctgacattttggataggaagaggattttgcttttcctgctgctgcaattgcttttggatctttctctggtttggaaagattgattgtaatgtcaagagtgccgtattttgtgtcaaccgtccatttgcgatccttagcaatacggtatctgcggatataatcactgtcctggcttaatttgtaataataatcagtagctgtctccggagaaactttatatttttcccagaaagtctgctggatctgtgatgggcgtggcatcagggtattcatcagttttgtgtcaaataaatcacggtagccgatgctgttttcaatgattccgcgttctgcggcgatatctaaaagttctgcaagaatgtcttccagaacaagattgttcagatcacagtcaacatcttcatagttatcttcgtggaacagatccagaagaagattcgttgtataaattctttcggattccggagtgattccggtattgattccgtactgtactaattttttgatcgcatcataaagcatatgtcaaggacctccttaaattagggaatgccaatggcattcctataacaaaatatacgttatttcatatctgatctcagtagagacgagtattagtcgagacgagaagcaccgtctccgatatctactgtgtagaactcggcttcatgtcctactttttcaagatatgtttttccgatggtttcgataaatgtatctatggattcattttttacgatgctgactgtgcaaccgccaaatccgccgcctgtgatacgggaaccaagaacaccaggaatcttccatgcaaggtctacaaggatatcaatctcttcacaggatacatcataatcatcacgcagtgaaatgtgagactgattcattaattttccgaatctttcaatgtctccggctttcagcgctgtaacagcatcgattgtacgctggttttcgtatacagcatgttttgcacgctgtaactggatctcatctttgatcaaggatttgtgtgcctcgaattcttcaggagtaagatcgccaagtgcctgaatgtcaagttcgctctgaagtgctttcagtgcagcagcacattcgtttcttctgtcgttataagcagaatcaacaagactatgctttactttactgtttgtgatcacaatcttggcaccatcaagaacacaaggtgcatattcgtagcttaaatcacttgtatcaaggaaaattgcgtggtcttttttacccatggcaacagcaaactgatccatgataccacagttgcatccattgaagttattctcagaatactggccgatcagtgcaagatctgtcatggaaagatctttgatctcgaacaggtctgtcaggatcacaccagtgagaacttcaagggaagcagaagaggaaagtccggaaccgttcgggatatttccccagattaccatatcaaaaccacttgtgattgtatgtcctttttctttgaatgcccagactacaccaagcggatagtttgcccagttgtattcttttttatttgtcagatcatcaagagatgcttctacaacaccaaaggagtccagattcatggaataaagatggatcttgttatcctctcttttgcgtgcggcaccgtaagtaccaagtgtcagtgcacatggaaatacatgtccaccgttataatctgtgtgttcaccaatcagattcacgcgtccaggagaaaagtaaaaacgagctccttcggaatcaccaaaaagttctgcaaacatatcaaacaattttttcttcatcattatttacctccatttaaagtaatcgtatcgatctgatttatttatatttattatagcgttaacgagtggaaacgtctataaaaaatacgtgctgtggtatgtaataatgttgcattaaaaagacgaggtgttataataatgatgatgaggattgcgggaattgcatagcaatggagcaatccggttacagcagtgagtggcaaaattttcttttgacactcacatcatagatcacaggatacgggaaaggagccggaagatggcagagacttacaaacattcgtataagtcaggagaaattctgatgacttcgctgtctgtatataacacgggatatcaaaggtgtgaagcaggatatcagtggggacccggagtcagggatcattattgtatccatcatattttgtcaggagcaggatactatacagttggagaaaagacatggaaattagaagccggagatacttttatcttatatccgggcgtggaagtaaagtattatgccgatcagcaggagccatgggaatatgcctgggcaggattcatggggacggatgcggcatcgatcattcgaaatacaggttttttgaaagaacgtccttttttaaaaagaggaaatgtgccggatgaccagattcggaatggattggaacagatttataatgcaaagagcaatgggtatgaagaagcggttgccatgacaggagcactttacagtcttctgtcagtctttatgcactatcatgagggggaagatcaggaaagagatgcaaagcttttgtatgtagaaaaggcagaaaactatatagaaaccaattattcttatcccgtgacggtggaagatattgcagactatgtaggaatcagcagaagtcatctgttccgctcttttcagacctatatgaattgttcgccaaaagaatatctgacagaatatagaatccagcaggcttgccgtctgttgaaagagacggggctgtcggtttcggcgattgcatattctgttggttttgagaataatctttatttttcgaaggcattccggaaagtgaagaagacaagtccgacggaatacagagaaaagcatagaaaaaagaaggaatgatgccgaggtgcaggacataagaatagagtaagaatgtcaaaggcgggaagctgtcatgatgtctggaaaaagatggggttatgtagtacagtttttctgtcttctggtgtttttgggtatgtccccatttctgataaagatggatgggagaaaaacaatgagcgtttcatctgattcagtgcgaagtcagaatgtatcagatgaggtaaaaccggttgttgcgcttacatttgatgacgggccaaatgcatcctcgaccccgattctactggatggattgaaggaacgtaaagtgcgggcaaccttttttctgatcggcgaaaatgtagaaaaagacgagaatgaaaaaattgtgaaaagaatgtatgaagaaggtcatttgatcggaaatcatacttatacgcattgcaatctgtcaaagctggaaacgggagaagcaaagaaagaactggaacagacagatacagtgattgaaaagataacgggaaaacaaccggtgtttgtaagagcgccttacggggaactcccggtggacagcgaacaagatctgaacagaatatatatcggatggacggtggatccgctggactggatgaccgaagatacaggggcggttgtaaaaacagttgtggaagagataaatccgggagatgttattttattacatgattgttatccttcttctgtgcaggcagctatacggattgtagatctgctgcagggaaaaggctatgagtttgtgacagtggatcatctgattatggattgaagatgtgaatataagattgaaaacaggagagaaagatggatttatttgattatatgagagagacaaataaagagaaggaatccccgcttgcatccaggatgcgtccggtgacactggatgaagtagtgggacagaagcatatcataggaaaagataaattgctttaccgggcaattaaggcagataagctgagttctttgattttttacggacctccgggaacaggaaagacaacactggcaaaggtgatcgcacatacaaccagcgcagagttcaaacagatcaatgcgacagttgccggaaagaaagatatggaagaagtagtgaaagaagcaaaagatctgcagggaatgtatggaaaaaagacgattctttttattgatgaaattcatcgctttaataaagggcagcaggattatctgcttccatttgtggaagatggaacgttgatcctgattggcgcaacaacggagaatccttattttgaggtaaatggagctttgatttcgagatcaagtatttttgaattgcgtccattggagaagacagatattaaggaactgcttctccgtgcagtgaatgatactgagaaaggtcttggaagctttcatgcagtgatagaagatgatgcacttgaatttttggcagatgtgtcaggtggagatgcgagaaacgcactgaatgcgattgaactgggtgtactgacaacggacagaagcgaagatggacaaattcatattactctggatgttgcgtcagaatgcatccagaaacgagtggtgaattatgacaaaaaaggagataaccattacgatattatctctgcatttattaagagcatgcgcggctcagacccggatgcagcggtcttttatcttgcaaagatgttgtatgcaggagaagatgtgaagtttatagcgagaagaattatgatctgtgcatctgaagatgttggaaatgcggatccgatggcacttactgttgcggttgcggctgcacaggcagttgagcggatcggaatgccggaatctcagatcattctttcacaggcggtgacttatgtggcatctgcgccaaagagtaattctgccgttaatgcaatatttgcagcgaatgatgcagtacggaacaataaaacaacggttccgacacaccttcaggatgcacattataaaggtgcacagaaattaggacacggaataggatataagtacgcacatgattatccaaatcattatgtggatcagcagtatcttccggatgaaataaaagacgccaggttctatgaacccggcgaccttggttatgagaaacagatcaaggagcgtttacagaagctgcgagagcagtaaagcgtaaatctcctgattctttcgattccagttatttacaatggcttctgcctcagtctgagttggcacagtgagtgtcatatcaatgaggtgggagccattttctaaaatctggcattttacttcatattcatggtttgtattcagatagtaatctgatttaacagaaacctcttctttcagatcatattttttctcattgataaaattatcaatttcctgacgaatctcaggagaaattttatttctgaaatagttgatcgtagcagctccttcttctgtgagattataaagcgtacgattatgtgtcagctcaattttcagaagcccggaatccgttaattctgcaagtgcagactgaagacgaaaataagttgtataccctttatccagaatgaattctgatatctgggaagttgtaagcggaaaatcgactctatccaacatgtacaacacgatcagtttatataatgtaaatgtttcagccataatactcctttccctggtacaagtcatgatctttcatatatttgtgaatctgatttaaaacagttcgttttgcgcctgtccacagaggtgcgatcaagagatccttcggtccgtcaccggtcagtcggtgaatgacgatttccggacgcaaatgctggatacattcagtgagcagacggatgtattcgtccgcatccgggatatggaaagcaggaccggtataagcaggatctgaaagacatttctgatattcaactgcaagatcagttcctttcaaaatgtggagaagctgcaacttgattccgtcaatatttgaatgattcaaatattcgattgtctcaagcatcatttcgtgagtctctccgggcagaaataaaatgacatgtacgataacagtcagattccggcgtttcagttcatgcacagcagtatcaaatacctctaaaggatagcctctgcgaatgtatctggcggattctgggtgaatggtttgaagaccaagttcaacccagacgggcttgatctgattcaattcatctaaaagttccagaacatcagaatctaaacagtcagggcgggttgcgattgcaagtactttcacatcggggtcctcaattgcttctgtaaaaactttccgcaaatattctatgggggcataggtactcgtaaaggcctggaaatatgcgatataagcatgcaccggacgctttctggcaagaatggctttcccttctgcaagctgttctgtaatcgttttgcaggcagaaccggcaaaatctccagaacccataccactgcagaaaatacagccgccatatccgatcttaccatcacggttcggacaagtcataccgccgttcaatgcaatgcgatatactttctctccaaactgggatttcagtgcatagtcaagagagtggtagcgcttctctccccacatattagattaaatccttaattgctttgcttactgtgtctgctacacgaggatcaaaggcttccggaagaatgttgttttcattcaattcttcttccggaacaagacctgcgattgcattggcagcggcaagtttcatttcttctgtaatctgtgtggcacgtccttctaatgcacctttgaaaataccagggaatgcaacaacattgtttacctggttcgggaagtcagaacgtcctgttccgacaactttggcacctgcttcttttgcaaggtcaggcatgatctccggtacagggtttgccatggcgaacagaatcgcatccttattcatggaagcaaccatctctttagaaacaatattcggagcagaaacaccaacgaaaatgtcagcaccttttaatgcatcggcaagtgttcctgtgcgttcttccagatttgtaacttcagtcatctgctgctgcatccagttcaggttcggtgagttcttggaaatgattccgttgatgtcacacattgtaatatgagggaaaccataagtgagaagcagctttgtgatagcaactccggcagatccggctccattcactacaacacggcaatcttcctttttctttccagttactttcagggcattgatgattccggcgaggacaacgatagctgttccgtgctggtcatcatggaaaaccggaatgttcagaagttctttcaggcgtgtttcgatttcaaaacagcgtggagctgaaatatcttccaggttgattccgccgaaagccggtgcgatgttgactacagatttaatgatctcttctgtgtcctgtgtatccagacagatcggaactgcattgacaccaccgaattccttgaacaggaccgcttttccctccataaccggcatagcagcaagtgcaccgatgtttccaagaccaagaacagcgcttccgtcagatacaacagcaactgtattggctttcatagtgtatttatatgcggcttcgggatcctgtgcgatcaccttacaaggttcagcaacacccggagtataagcgatggcaagatcttctcttgagttgacatgcgctttggcggttgtctctatcttaccattccattcttcatgcatttttaaagctttttcattgtttgtcatgattttatacctctctgatttgattgaattaatgataccactgaaaaaggaaacacgcaagtacaggaaaacagagaaaagttcaaaaagttctttctttttagaaaaatatactgtataataacaccatatttaaagcaaatttccattaaagtcgaatcagacttgtattcccgaagtatgaatgaataatccagtatgtgaaaagggcacatgtgaagtggattgacagaacaaatttacctgaaaagaaaggaaaagaatatgacacgagaaaaatatgaatcattgccgctggcaacattgaaagaacttgcaaaagcaagaaagatgagaggtgtttctacattaaagaaaggcgatctgatcgatgcaatgcttgagctggatgagcaggaagagcagaaagaggcagcagaagaagcgagagaagaagtaaaagaagaaaaaaaagaagagacagatattgaacagctggacagtggttttacagcaaacggaatccttgaggtgcttcaggatggatatggattcattcgttctgacaattatcttccgggagatggagatgtctatgttgctccttcccagattcgcagattcggacttaaaacaggcgatatcctgacaggaaatacaagagttaagacgcagggagaaaagttcagtgcacttctttatgtgtctacgatcaatggactgcgcccggcagaggcaatgaagagaaagaactttgaagacctgactccgattttcccgaatcagagaatccgtctggagaatccgggctgtacaacagcaatgcgtattgttgatcttgtttcccctattggaaagggacagagaggtatgattgtatctccaccgaaagcaggaaaaactacattattaaaagaagttgcattatctgtacagaagacagaaccgaatatgcatcttctgattctgttgatcgatgaacgtccggaagaggtaactgatattcgtgaggccattgaaggtccgaatgtagaggtgattcattctacatttgatgaacttccggagcatcacaaacgagtatcagaaatggttatctcaagagcaaaacgtctggtagagcatggaaaagacgttatgattcttcttgacagcatcacaagactttcaagagcatataacctgatcgttccaccatcaggaagaacactttccggtggtcttgatccggcagcactttacagtccaaagcgtttcttcggagcagcaagaaatatgagagaaggtggaagccttacgattcttgcaacagcactggttgatacaggaagcaagatggatgatgttgtttatgaagaatttaaggggacaggtaacatggaactgatgcttgacagaaagcttcaggagaaaagagtgttcccggcaattgatattccaaaatcaggaacaagaagagaagatcttcttcttacaaaggaagaacaggatgcagtttatattatgagaaaagcaatgaacggcatgaaatcagaagaggcagtggacaatcttttgaatatgttttctcgtacaaaaacaaacgaagagcttgttcagcagatcatccgtcagaaatttatctaaaaaggtattgcattattaaaaaatgtgtgatacaattagaaagctgtttagagaaaataataagtaatttaaaaatagagaggtgaaaatcatgcgcgaaggtatccatcctaattattatcaggcaactgtaacatgcaactgtggaaacacatttgttacaggatctacaaaggagaacatccacgtagaaatctgctccaagtgtcatccattctacacaggtcagcagaaagcaacacaggctcgtggccgtgttgataagttcaataagaaatacggtattaaataagaaatacgaagtgatgagggctgaggtggaaatctcagtcctctttgtgtttaggagaaatatatgaaatcatcgaatataggcggccaggcagtgctggaaggcattatgatgaagaatcgggaaacatattccgttgccgtccggaaaccagatggagagattgaagttgatattcaggaatacaaaggagttctcccatggaaggcaccgcaaaagattcctttcattcgggggatttttaattttgtggattctcttgtgctgggaatgaagacattgacttattctgcaagtttttttgaagacgaggaagaagaaattcttacagaagatgaggcaagaaagcaggagaagaaggaaaaactgatcatgaatctgacagttgtggtttctgtcttaattgcggttggtatttttatggttcttccgtattatctgagtagtattatagaaaagcatacctcttcacatcttgtgatgactgttttagaaggtgtgatccgcgttgctattttcctgatctatattgttctgatttccagaacaaaggatattaagagaacatttatgtatcacggggcagagcataaatgtattaattgcatcgaacatggattggaattaaatgtagaaaatgtacggaagagttccaaacaacataagagatgtggaacgagctttcttttctttgtcatgatcgtaagcattattgtctgcttttttattacggcaaagtcccagattgtgagagtacttcttcggatcgccctgcttccgttgattgcaggaatctcttatgaattgattcgtctggcaggaaacagcgatcatccggtaatcaatgtacttagtaaaccgggactctgggttcagaatctgacaacaaaggaaccggatgacagtatgatcgaggttgggatcaaagcagtggaagcagtgtttgactggaagacatggcaggaggagaacctgaagcaatgagaacagaatcagacaagaggacagtgtataaaacagattgcagcgattcaataagtttgaaaaatgcatataaagaaggaaaagaaattcttgcgaaagcaggaattacagaggcagatctggatgcgtggtatctgttggaatttgtgacagggattacgaaagctcgctattatatggatccggatcagagcatggatccggaagcatgggaaaagtataaagaatatcttgaaaaaagaagaaatcatattccattgcagcatattacaggaagtcaggaatttatggggcttgaatttctggtgaatgaacatgtgctgattccaagacaagatacagaagtgcttgtggaagaggcactggagataatgaaacaagagatattcagatcaaaaggttgtttgcaactgttggatatgtgtactgggtcaggatgtattcttctgagcgtaatgcattatgcagaacaaaagggtatatttatagaaggaacaggtgttgacttttcggagcaggctcttatggtagcgcagaaaaatgaaaaacatttgagaagcacgaaaaaggatgagaatggaaaagtgaactggattttgagtgatctttttgaaaatgtcaatgaaacctatgatatgatcttatcaaacccaccttatatcagaacagcagaaattgagaagcttcaagacgaagtgaaacttcacgatccattcagtgcattggatgggaaagaagacggattgtatttctaccggaagattgttactgatgcaaaacaattcctgaaaacaggagggatacttgctttcgagattggatatgaccagggcaaagaagtttctgatcttatgaaaaaagcaggatatgacaaggtgttcgtaaaaaaggacctggcaggacttgaccgcatcgtctgtggcgtgtactattaaaaagataaagaagataaaaaatagaagaggatatagaactatgtttgacagattagaggatttggtaattcgttaccaggaagtaatgggtgaacttcaggagccggatgtggcaaatgatccggaacgtttccgtaagctgatgaaagagcagagtgatcttgcaccaatcgttgaagcttatcaggaatataagaactgtaagcagaatgtagaagagagtctgatgattctggaagaagaatcagatgaagagatgcgtgaacttgcaaaagaagagttgaatgaatctaaagccagaattgaagaattggagcaggaacttaagattcttcttcttccgaaggatccgaatgatgataagaacgttatcgttgagatccgtgccggtgcaggtggagatgaggctgcactttttgcggcagaagtttatcgtatgtatgtgcattatgcagacagccgtagatggaagacagagatgatctctctgaatgagaatggaatcggcggatttaaagagtgtgtattcatgatcacaggacagggagcatattcccgtatgaagtacgaaagtggagtacatcgtgtacagcgtgtgccggagacagaaagtggcggaagaattcatacttcaacaattactgtagccgtaatgcctgaggcagaagaagttgatgttgtaatcgatgagaaggatatccgtatcgatgtaatgcgtgcatcaggaaatggtggacagtgtgtcaatacaacggactctgcggtacgactgactcattacccgaccggaatcgtgatctacagccagacagagaaatcacagctgcagaataaagagaaggcattccgactgcttcgttccaaactgtatgacctggagcttgagaagaaacaggcttctgaggcagcagagagaagaagtcagattggtacaggagatcgttctgagaagatcagaacttataattttccacagggaagagtaacagatcatagaatcaagctgacacttcataaactggatagcattctgaatggtgatctagatgaagtgatcgacagcctgattgcagcggatcagacagcgaagcttgcaaagatggaggagtagtacaaagatgataccggaattcaaacgaccggaactggaagacaaagaactgattgactattattttgcacaggctccaagcagaagctgcgagagaacatttgcgaatgtatatctctggtccagacagtataaagtgaaatatgcaatccttcataatgcacttgtatttcgtgatgaaggagatggacatacttatgcttaccctgtaggaaagccggaagccgtcaaagctgcattggaagaattgatgaagatctgcgaggatgaagactgtgaattcggtctttactgtgtgacaccggagaatttttcacagatggaagagtggtatccgggacaattccagattgaatatgacagagatcaggcagattacatctatgagacggagaagcttgcaacacttgcaggaaagaaacttcacggaaagcgaaaccatattaataagtttaagcagctttatccggactggtcttacgaatcactcagtgatgagaatgtagaagcgtgctttcagatggctctgaagtggagaaattcgaatggatgtaatgatgatcctgagaagaacgcagagatgtgcgtttcgttgaattccctccgtttatacaaagaactcggctttaaaggcggagtgttgagaaatggcgaaaaaattgttgcttttacagtaggggaagaactgtgcaaggatacatttgttgttcatattgagaaagcatttgcagatgtacagggagcataccctatgattaatcagcagtttgttgaacatgaatgtatggattacacttatgtgaacagagaagatgatgccggggaagaaggacttcgtaaggcaaaattatcttatcgcccggcttttttggaagagaaagggtttgtgacaagaataggaggacagcaatgatttcaaaaaaaatggaaaacatggtagcgaacagttctgcaatccgtgcaatgtttgaagagggcaaccgtcttgcagcaaaatacggagcagagaatgtatttgacttcagtttgggaaatccgaatgttccggcaccggaagcggtaaagaaagcaatgatcgagatcctttccgaagaggatccgatcgtgcttcacggttatacgaacagcaatgcaggttatgaggatgtgagacaggcagttgctgattctttaaatgaacgctttggaacaaactttgcttcccgcaatattacgatgacagtcggagcagcaggaggtcttaatgtgattttgaaatcactgctgaatccaggtgatgaagttgttgtgtttgctccttattttggagaatacagaagctatgcggataattatgacggtgtgatcgtggagatatctccggatacagagacattccagccaaagcttgatgagtttgagaaaaagctgtcgccaaagacaaaggcagtcatcgttaatacgccgaataatccgacaggtgttgtttattccgaagagacgatccagaagctggcaacgattcttgagaagaaacagaaagaatttggaacagagatttatctgatttcagatgaaccatacagagaacttgcttatgacggagtggaagttccatatctcacaaagtattatgcaaatacagttgtaggatattctttcagtaaatcactttctcttccgggagaacgtatcggttatcttgtaattccggatgaagtggcagacagtgagaaactgaacgccgcagctaacgttgcaacgagaattcttggatttgtcaatgcaccgacactgcagcagaaagtggtgaaggcatgtctgaatgagaagacagatatttcatattatgacagaaacagagagactctttataatggattgaaagaacttggatttgagtgcatcaaaccggaaggagcattttatctctttgtaaaatcaccggttgcagatgaaaaagaattttgtaataccgcgaagaaatacaatattctgatcgttccgggaagctcttttggatgtcccggatatgtcagaatggcgtattgtgtagcatatgaaacaattgtaaatgcacttccaaaatttgcggagcttgcgagagagtatagatagaggtagtaccatggctgtaagagaagaacttttgagaaatatacgtagcgtagaaccatatgtaccgggcgagcagccacagcataaggttgtgaaactgaatacaaatgagaatccatatccaccggcaccgggagtggaacgtgttctgaaagagatggacacagaccgttttcgcctgtatccggatccaactgcggacgaactcgttggaagtctcgcagattattatggtgtaggaaaagatcaggtttttgtaggggttggatctgatgatgtgatttcgatgtgtttccttacattttttaattcagatctcccaattctcttcccggatattacatattcgttttataaagtctgggcagaattatatcggattccttatcactgtccagaacttgatgaaaactttaagattgtgaaagaggattattatgctgaaaacggcggaattattttcccgaatccaaatgcgccgacagcaatttatgaagatcttgaatttgtagaagatatcttaaagcagaataggaattctatcgtgatcgtagatgaggcgtatattgattttgcgggaagatctgcgatggaactgatcgataaatatgataatcttattgtgacacagactttctcaaaggcaagaagtatggctggtatgcgaatcggatatgcaatctcgaatccagatctgatccgctgcctgaatgatgtgaaatattcttttaactcttacacgatgaatcagacagctcttgcctgtggtgtggaagcggttgaagacaaggcatattttgaagaaggagttcgtaaaatagttgaaacaagagaatgggcaaaagaagagctcaggaaacttggttttgttttcccggatgcaaaggcgaattttattttcgcaagacatccagaggttgatgcgaatgaacttttccaggttttgaaagagaataatatctttgtcagacattggaatgcaccacgaatcgatcagtatctgagaattacaattggtacaagagaagagatggcgacgctttttgattttttgagaacatatataaaggagaaataactgaatgagtgaagctttgatcaactggtttatggtgacactgggcggaaaggtcggtaaggaatttattcttttcctgatctcaatggttccgattctggaattgcgtggaggactgcttgcagcaggaccggcatttttgaatgtggaacttgcaaaagcagtacctatctgtgtgattggaaatcttgttccaattccattcatccttttactgatcacaaagatctttgactggatgaaaggaacgaagcgtttgaagccgatggtggagaagctggagaagaaggcaatgagtaaaagtgacaagatagagaaatatgaattctggggtcttgtactttttgttggaattcctcttcctggaacaggagcgtggacaggatcactgatcgcagctctgcttggaatccgctttagaaaagcttttccggcagttgttgttggtgtctgcctcgcagcatttattatgtcagtcatttcctatggaattattggcggtatttttggataagataaatatgcaaaggaagtgattcttatgttactgaaagataatgaagaaaagagaaatatagcctggagaacagttatgacggttacttcagttctgatcattctgatcgttgtttttttcgctgtgaagctttttacttccaatcctctgacaggaaattgggagaacacagatgatggaatgaagctgacgatcaagaataacggaacaatggatattgtgcaggctttggacgagagtacagtcagcgttcctgttgattatacaattgatatggaacataagcgttttgcaattcatgtgaacgaagaaaagatagcaaaacaggctgaaaaaacaaaggactgttccaaacaggagcttcaggatattgcggatgtgatggaaggaacttacgaatacagcgtggaacagaacgtactgacactgactgattcagaatatggaagtcagaagacatttgaaaaaagtggaaagtaaacggtgattctgcctcagcagatgacacagaaagaacttgcagagcagtggaaacagggggtacagatcatgtacagaaatcagacgaaagaagtaagaattggggatgttgtgattgggggagaccatccgatagcaatccagtctatgacaaatacaaggacagaagatgtagaagccacagtggagcagatcctgcgtctggaaaaagcaggatgtgagattatccgctgtacagttccgacaatggaggctgcaaaagcaatcaaagagattaaaaaacagattcatattccgcttgttgcagacattcattttgattataagatggcaatcgcagcaattgagaatggagctgataagattcgtatcaatccggggaatatcggtgcaaaagaacgggtacaggcagtagtagacaaagcgaaagagtacaatgttccaatccgtgtcggcgtaaacagtggttctcttgagaaacatctgcttgagaaatatggtggtgttactgcagaagggatcgtggagagtgcgctggataaagttcatctgatcgagtctatgggctatgacaaccttgttgtcagcattaaatcttctgatgttctgatgtgtgtgaaggcgcatgagctgatcgctaaggaatgcccatatccgcttcatgttggaattacagagtctggaactgtatattcaggaaatgtgaaatcttctgtaggacttggaatcattctccatgagggaatcggtaatacaattcgtgtttccctgacaggagatccggtagaagagattcgtacagcaaaactgattcttaagacacttggacttcgcaagggaggtattgaagttgtatcctgtccgacttgtggaagaacaagaattgatctgatcaagcttgcaaaccaggtagaagagatggtagcagacattccgcttgatattaaagttgcagttatgggatgtgttgtaaacggacctggagaggcaaaagaagccgatatcggaattgcaggaggtatcggggaaggacttttgatcaagaagggtgagatcatcaagaaggtaaaggaagaagaacttcttgatactttaagacaggagttattgaattggaacaaataaagaatgaaaaaacattttttcatgtatttcccacattgaaagtagaagaggaatttaaagtcctctttgctgatgtggaagttaagaaaatcacgactaattccggtcgtgattttctgcatgtacatttaaagagtcatcatctgatcccaaagaagaaaatatggcagatggagcagcggatcaaagagcagctctttggaacatcttctgtaaaacttcagattctggaagagtatgagctgtctgagctttatacaccggaagcggtgatggaagagtacaaggagagtttgattcttgaactgaaagaaatcagtgtccttgctgcaaacatgttttcacaggcagaagtgaactatgaagagggaaatgtcgtccgtctggagcttcttgatacgattgtttccgaaggaagaaaagaagaaatcatgaatctgctggacgatgtattcaggaatcgttttcatatgaatgttgatatccgggttacatataaagaaaacgagggtcagggaagcagagaatatgacgagcagaggattcagcaggaaattaatgcaatctttgaacggcgcgcgaaacagagaggcgaatatgaggagcgaaagtctgctgtggaggcaaagaagaagtcatccgaatcaggaagctcgtcttccggagaaaagaaagcagagacttcaggaaaatcttcttcaggaaatgcatccgtttcgggcggaaagaaagagttcaaaaagaaggaattccgcaagaaggattatgtgcgtccggtgaagatcggagatgatccgaacctgatctacggaaagaattttgaagatgagccaatcaaattggaacaggttgtttctgagatgggtgagatcacaattcatggtaagatcatcaattttgatacacgggagatcagaaatgagaagacgatcattatctttgctgtgactgattttacggatacaatcacgatcaagatgtttgccagaaatgatcagttaccggagattctcggagatttgaagaaaggtgctttcgttaaaatcaaaggcgtgacgacaattgataaattcgatggtgaactgacaatcggttcaattaccggaatcaagaagattggagactttacggtctcaaggcaagatctcaatccaacgaaacgtgtagaacttcattgccatacaaagatgagcgatatggatggagtttctgaagtgacagatatcgtccgcagagcacatgactggggacacccggcgattgcaattacagatcatggtgtagcccaggcgttcccggttgcaaatcattatattgagacattggataaagatgatccgtttaaagttctatatggtgtggaaggttatgtggtcgatgacttaactgagattgcagttaatgcaaaagatcagacattggatgatacctatattgtttttgatatcgagacaacaggattcagttctatccgtgacagaattattgagattggagctgtgaaggttgagaatgggcagattgtagacaagttcagtacctttgtaaatccggaacgcccgattcctttcgaaatcacaaacctgacaagtattacagatgagatggtgctggatgctccgacaatcgaggttgtgctgccacagtttctcgaatttattggtgagggcgcattggttgcgcataatgcaggatttgatgttgggtttatcgaacagaattgtcgtgtgcttggtctggaacaggaattcacagctgttgatacagtggctcttgcacgtgtgctgcttccgaccctttcgaaatataaattgaatctggttgcaaaagcacttggaatttcattagaaaatcatcatcgtgcggttgatgatgcaggggcaacagcagaaatttttgtaaaatttgttgaaatgctcaaagatcagcacatcatgaacttaaaagaaatgaacaagtttggggatcgtaatgttaatgcaatccgtaagatgccgacacatcacattattttgatcgcacagaatgatattggaagatataatctgtatcagctgatcacggcatctcatatgacatattatgcaagaagaccgagaattccgaaaagtctgatcaatgaacacagagaaggaatcatcattggaagtgcctgtgaggcaggagaattataccgtgcggttcttgaaaaacagtctgcacagcagattgcgagactggcagatttctatgattattatgaaatccagccaattggaaatgatatgtttatgctcgaagatgagaaaacgccgaatatcaatacagaggaagatctgcgtaacgtaaaccgggagattgttgaacttggagagaaattcggtaagccggttgtagcaacctgtgacgttcatttccttgatccggaggatgaagtttatcgccggatcatcatggcaggaaaaggattcaaagacgcagataatcaggcaccgctgttccttcgcacaacagatgaaatgttggaagagttcgcatatcttggttctgcgaaggcaagagaagttgttatagaaaatccacagaagatcgcacgtatggtagagaaaatctcaccggtaaacccaaataagtgtcctccggtaatcgcggattccgatcaggagcttcgagatatctgttatcgtaaagcacatgaaatgtatggagaagatcttccggtacaggtgtcttccagacttgagaaagagctgaactctattatttccaacggctatgccgttatgtatatcattgcgcagaaactggtatggaagtccaatgcggatgggtatcttgttggttcccgtggatcagtaggttcgtcttttgttgcgacaatgtccggaatcacggaggttaatccgctaagccctcactattactgtgaaaaatgccattacagtgattttgagtctgaagaggttcgggcatttgccggaggctgtggttacgacatgccggatagaaattgtcctgtgtgcggagaaaaactggtcaaggccgggtttgatattccgtttgaaacattccttggtttcaagggagataaagagccggatattgacctgaacttctccggagattaccaggcgaaggctcataaatatacagaggttctctttggtgagggtcatacattcaaagccggaacgatcggtacgctggcagataagacagcatatggatttgtgaaaaactattatgaagaacgtggtcagagaaagcgtggctgtgagattgaacgaattacagaaggatgtaccggaatccggcgaagtaccggacagcatccgggaggaatcgtagtacttccgcacggacacagcatcaatgagtttacaccggtgcagcatccggccaacgatatggaatgtggcattacaacgacacattttgattaccattccattgaccataaccttttgaaacttgatattctcggacatgatgatcctacgatgattcgtacattggaagactatatcacctccgatgcaatggaaaatgaatataatgaggagcatcctttcgttgcaacggatattccgctggatgacaagaaagtaatcgaactattccatggcacagaaattctcggaatcaaaccggaagacatcgacggctgtaagcttggatgtcttggaatcccggagttcggtacggatttcgttattcagatggtgcaggatacaaaacctcagacgttatcagatttgatccgaatttccggtctgtcacatggaacgaacgtgtggctcggaaatgcacaggaacttgtaaaatccggaaaagcaaccatttctacggcaatctgtacccgtgacgatatcatgatctatctgatcaacaaaggagtggaaagtgcactggcctttacaattatggagagtgtgcgtaaaggaaaaggattgaaaccggagtgggaagaagcgatgaaagctcaggatgtaccggactggtatatatggtcctgtaagaagatcagctacatgttcccaaaggctcatgcggcagcctatgttatgatggcttatcgtatcgcttattgtaagatcaattatccgcttgcttattatggagcatattttggaatccgtgcggatgcattttcttatgcgatcatgtgtcagggcaaggataaactgaattactacatgaaagattataaaaaacgaagtgataccctgacgaaaaaagaacaggatgtcatgaaagatatgaagattgtccaggaaatgtacgcacgaggactggagtttatgccgattgatatttaccgggcgaaggcgaagatgtttcagatcattgacggaaaactgatgccgtctcttgccagcatcgaaggaatgggagataaggcggcggaagctgtggaagaagcttcaaaagacggtccatatctctcactggatgatttccgtcagaggacaaaagtaagtaagacagtgatcgatctgatggcagaactgggattatttgggaatcttccacagagtaatcagctttccttgtttgatttttcgtaggaaatgcgctagacggatgtaaagtgctgtgctataatgactacaacgctttgacgtggtaaagctttaatggaggaagagataatgtacgatttcgatgagattatgaacacagacccagagatagcagatgcaataaaagcagagatggagagacagaactcccatatcgagctgatcgcctctgagaactgggtgagcaaagcagtcatggcagctatgggaagccctctgactaataagtatgcagaaggatatccgggaaagagatattatggtggatgtcagtgtgtagatgtagtagaagaccttgcaagagaaagagcaaagaaactgtttggatgtgagtatgttaatgtgcagccacattcaggagcacaggcgaacatggcagttatgtttgccatgcttgagccgggagataagatcatggggatgaaccttgatcatggcggacatctgacacacggttcaccggttaatatgtccggtaaatattttgatgtagcacattacggagtgaatgcagacggcgtgatcgattatgatgaagtgcttcgtattgcgaaggaacataaaccgaaactgattgttgcaggagcaagtgcttatgcaagaacgattgatttcaagcgtttccgtgagatcgcagatgaggtgggagcatatctgatggtagatatcgcacacatcgcaggacttgttgctacaggacttcatccaagtccgattccgtatgcgcatgtgacaacaacaacaacacataagacactccgtggaccaagaggtggaatgatcatgtgcagcgaagagatgaataaaaaattcaatttcaacaaagctgtattcccgggaattcagggaggtccgttgatgcatgtgatcgccggtaaggcagtttgcttcaaggaagcacttgagcctgagtataaaacatatatggagcaggttgttaaaaatgcgaaagcactctgtaacggtttgaaagcacgcggagttaagattgtttcgggagatacagataaccatctgatgcttgtagacctgtcaggaacagagacaagcggaaaagagctggagaagcgtcttgatgatgctcatgtaacagcgaacaagaatacaattccgaatgatcctcgttcaccgtttgtaacaagtggtgtaagacttggaacaccagcggttacaacacgtggaatgaaggaagatgatatggataagatcgcagagattattgcaatggtaatcgaaagtgaagaaaatgtagagaaagcaaaagcaatggttgctgagctgactgcaaaatatccactttgttaataaaataattatatccggcaaaactgcatttcgcgtgtaagcgtaatgtagattgccggggtgtgcaacaaaaaaagagcttaaaaaagctcttttttgttaatcgaatttctgtattacttttaaaaattaaatacggtctatttattaattaaaaggtacataaagtcttgattaaagtttcactacgttaacagcctgaggtcctttagcgccttctgttacttcgaactcaacagcctggccctcttcgagagatttgaatccatccattacaagtcctgaataatgaacaaaaatgtcattgccttcagcgtcagagataaatccgtaacccttctggttattaaaccattttactgtacctgtcattgtgttgccctccattaaaagaatataagttgttaaatcatcacagtttacaatgcgctgaaaactgtaatattgtgtcagtataaattcatattgacactttgtctattgtagcatgtttaacaaagaaagtcaaatgtaatcttttttgatttgtagaaaaatgacaaaaacatgtgaaatgacgtaaaatcgatttcaacaatttgtaaataccatttagcatatcggatttataagattggtaaaaaatagaagtgcgaggaaagattattttacgaatggattggaaaaataaaggatgtcgattgaaaaaagaattgaagtattatataatttaaccaatgtctatgaaatattttatttcaaggaggatttgtgtatatgataacgattgaaggaaaaagcgtatttggtggagtatccattggaaagctgatgttctataagagaaacgaaaaggtgatcagaagaacacatgtagatgatgtggatgcagaatggaagagattcgaagaggctaagaatacagcaatcgaccagctgaaagttctctacgacaaagccattgaagatgtaggtgaggccaacgccatgatctttgagattcaccagatgatgcttgatgatctggattatctggaatctattgaaggaattatccgtacacaaagtgtaaatgcagagtatgctgtttcaacaacagctgataactttgcacagatgtttgcatctatggatgatgcatatatgcagggacgtgcagcagatgtgaaggacgtttccgagcgtgtgcttgatattctctgcggagtgagcaacggaacacgtgagatgacagaaccttgtattgttgctgcagatgatctcgcaccaagtgagacagtacagcttgacaaagagaaggtacttggatttgctacaatgtatggttcttctaactctcatacagcgatccttgcaagaacaatgaatattccggctgtaatcggaatgggcgaagctcttaatccgaaatatgacggagagatggctatcattgatggatttacaggaacactctatgtggatccagatgaagagacacttgcaaagatgcaggagaagcgtgcgaaagaccttgagcagaaagaacttctgaatcagcttaaaggaaaagagaatgtgacaaagagcggacagaagatcaatgtctatgcgaacattggtaacgtatctgatcttggtgcagtacttaagaatgatgcaggcggagtaggtctgtttagaagtgagttcctttatcttgagaacagtacttatccgacagaagaacagcagtttgcagcttacagacaggttgtagaaagcatggcaggaaagaaagtcatcattcgtacacttgatatcggagcagacaagcaggttgattatttcaatcttgcaaaagaagagaacccggcacttggatacagagcaatccgtatctgcctgacaagaccggagatcttcaagactcagcttcgtgcactttatcgtgcatccgtatatggaaacctttccattatgttcccgatgatcatttctgtaaaagaagttcgtaagatcaaagagatcatcgaagaagtgaaggcagagttgagagaagaaggacttccatttaaggaagacgtagaacttggtattatgatcgagacaccggcatcagttatgatgagccgcgaacttgcgaaagaagttgatttcttcagtgttggaacaaatgacctgacacagtatacactggcaattgaccgtcagaaccttgcgcttgatgagttctatgatccacatcacccggcagtgcttgctatgatcaagatggcagcagataatgcacacgcagaaggaaaatggatcggaatctgtggagaacttggagcggatcttgaactgacagaagagttcctgaagatgggactggacgaactgtctgtatctccggcgatggtactgccgctgagaaagaagattcgcgagtgtgagtaatttgtgtttttgaggggattcgtatggggaatgagcactttatagaatggtcgcaagaccagtcctgctattaccacgagcaccggctcgctctacctcatccctttgaaagtatgtaacgtaagagccagaacagttaccgtgtgtggtgcctgtctggctcttactaacatactgaacaaagtgtattcggaacgctcctgccttacatgtgcccatggcaacagcagaactgttctcgcttacactttcaaagagggggactcatttcaagaggaggaatccactcagaaatacagaattgaaagtaggaaagaaaacggatacttatcgactaggataatcagtgtattcaaaaatgaaagggggcggattttttggagagggagatttttttgtggctggggcttatggtagtgtttttgattattgagcttgccacggttggtctgacttcaatctggttttcgggcggtgcgctggcggcgttattagtttcgcttgccggagcgggaatggtgatacagattgctgtattcgtagttatttcagcagtgcttgtgatctttaccaggccttttgcagcgaagtatgttaatgtgcatcatgtgaagacaaattgtgatgaattgatcggaagtgttgttaaggtaacagagacggttgataattttgcacagaccggtactgcaattgcgcagggaaaggaatggactgcaaggtgcaagtcagacaaggacagaattgagaaagattcgcttgccaaagtaacagcaatttccggagtaaaactgattttagagaaatgtgaggaggatgagctatgatatttggacttattatttggatgatcattattatgatcgtggtgtggcttcttgtgtcgaatatccgtattgttccgcaggcgcatgcgtatgttgtagagcgacttggcggatacaaggagacatggggcgtaggattacattttaaggtgccgatccttgaccgtgtggcaaaaagagtttccttgaaagaacaggttgttgattttgaaccacaggcagtgatcacgaaggataatgttaccatgcagatcgatacggttgtattctatcagatcactgacccgaagaagtatgcatacggagtagaaagtccgattgcggcaatcgagaatctgacagcaacaacactccgtaatatcatcggagatctggaattagatgagacactgacttcccgtgagacgatcaactccaagatgcgtacgatccttgatattgcaacagatgagtggggaatcaaggtgaatcgtgttgaactgaagaatatcatgccaccgaaggcaatccaggatgcgatggagaaacagatgaaagcagagcgtgaacgccgtgaagcaatcctgcgtgcagaaggagagaagaagtctacgattcttgttgcagaaggagaaaaggaatctgtgatcctagaggcagaggcatctaagcaggcagcaatcctgaaagcagaagctgaaaaacagaaacggatcaaagaagcagagggacaggcagaagcgatccgttctgtacagaaggctacagcagaaggtatcgagtatattaagaatgccggagcagatgatgttgttcttacattaaagagtctggaggcatttgccaaggcggcagacggaaaagcgacgaagatcatcattccttcagagattcagggaattgcaggacttacgaaaacaatcgcagaagttgcccgtacagaaacaagcgttgcaaaagaaaaagaagtaaagtaaaataaaagatgtatttcagcgtgccaatctgttaaaagattggcacaatgtgttttacaacgataatattttggagtgcaaatgaaatggaaacagagaaaatcatcaggttatcggttcggaatctggttgaattcatattaaaagaaggtgacattgataacagaatttcaggtacgctggataaagatgcgatgctgatgggaggacgccttcaccgaaagatccagcgtatgatgggctcaaactatcaggcagaagtttccttaaaactgcaacttccgtgtgacggattccaattaaaactggaaggacgtgcggatggaattctccttgaatcagaaaaaacaataatagatgagatcaaaggcgtcgtgcgttcccttgatcgagtggagcgtcctgtgccggttcatcttgctcaggcaaaatgttacgcatatatttatgccagacagcagggattaaagcagatcagtgttcagatgacctattgtaatcttgatactgaagatgtgaaaagatttcgggaagagtatagatttgaagaattagaaaaatggtttcttgatctggttcatcagtatgaacgttgggcaaaactgcagattgagtgggaaaagagaagagatgcttcgattcatcagacccaatttccattcgcatatagagaagggcagtttgacctggcagcttccgtatatcgtacaatttatcacaaaaagaaattatttatccaggcctcaacaggaaccggaaagacgatggcagtattgtatccggcggtgaaagcaatcggagaaggattaggggataaattattctatctgacagcaaagacgatcacaagaaccgtggcggagcaggcattttctattcttgaagaaaagggtcttgcctttcgttcaattacattgactgcgaaagagaagatctgcttttgtgaggagacagaatgcaatccggatgcttgtccttatgcgaaaggtcattttgaccgggtgaatgatgcagtttatgacatgttggaaaagcaaaagaagctgacacgggaatcaattgaaagacaggcagaagattttcatgtatgtccgtttgaactatctcttgatctgtcagaatgggcggatggggtgatctgtgattataattatgtgttcgatccaacggcacatttgaaacgattttttgcagacaatgtcggcggagattatttgtttctgatcgatgaagcacacaatctcgtggaacgtggacgggaaatgtacagtgcttccatctataaagaagacattctcgaggtgaaaaaactgatgaaggaccgagataaaaaacttgtgaagagtctggaatctgtcaataaactgatgcttgagatgaaacgcgaatgcgagaattatcggttggtggaaagtgtttctccatttgcagtaaaactgatgaagcttctgactcaaatggaaagatatcttgaagaagagcggaatgcaggaaatgcagagcagccggatgcatttatggaactctttttccagttaaggcagtttttggaaattcatgaattgttggatgaaaattatatacagtatacagaactggaaggaaacggaagattcaaaataaagttgttctgtgtaaatccggcggagaatctgaatcagtatttaaaacttgggaattctacaatatttttctcggcaacattgcttccaatcgattactataaacaattactatctgttgagaaggatgattatgcagtctatgctgaatctaagttcccacaggagaacaggaaaattctgatcggaagtgaagcaagcacaaaatatacacaaagaggcacagaaatgtatcgcaaaattgccgattatctgagaagcacagtggatgggaagaatggaaactacattgcattttttccttcctatcagtttatggaggatgttttggaagagtttgaaaaactggcatccggagtagaactggtaattcaatcgcaatttatgtcagaaaatcagagagaagaattcttggaaatgtttgaagaagaaagagatcatccgatgcttggattttgtgtgatgggtggtgtattttcagaaggaatcgatcttacacatgacagattgatcggagtgatcgttgttggaacaggaattccacaggtgtgcaatgacagagaaatcgtgaaaaattattttgaccagagagggatgcgaggatttgattatgcgtacctttatcccggaatgaataaagtacttcagtccgcaggaagagtgatccgtaccgaagatgacaaaggaattattcttctgcttgatgaccgttttcagaatcggcagtatcagcagctatttccgagggagtggaaggaatacgaagtgtgtgggcggaaagagataaaagaaaagatggaagaattctgggagaaacgataaatgaaaaatgagaatcgttattggataaagaagaagtgattcaagaatatttgcaactgttcagagccagatgaaatttcataaaacaggtataaaatgcttgcattttaaggctggttttaaaattctgcttggctccgaacagtacaaaattttactgttctttaaaatagttcaaaaattcctgtgcaggcttagccagagggagctgctcgttgtaagcaatcacaagagaacgctccggcatctcttcttccatatccagcttgaagataccatcattgttctcagaaagacaataatccggaatgaatgcgattccaagcccaattcttgcaagatcgatcagaagatcattgcttgtaagttcgatctcaggaacgagatcaagctgatgctgctggaacaggcgatgaagaaactcgtttgtcgtactgttcttatccagcattaggatcggatagtggagcagatcggaaagtgtaagtttcttttcccttaattcaggataattgtttccggcaatgaaaacatcatggaaattcttgatcttcatagaggcggaaatattgttgagcgctgcgttcggataattgacaacaatcaaatccaccagtccgttctttaaaagctctgtacatcttaaagaagtctggttgataactttaatatgtacattcgggaaagtcttatggaatttctcaaggtatggaacaaggaaatatctgcagatcgtgtcacttgcaccgatgcggatctgcccaccggtagaagcggcatctaaaagctgagcctcacctttctggatcagattcatggccggttcaatgtggcgcaggagaatctctccttccggtgtgagctggactttctttgtgcttcggataaaaagcgtctgatccagttttcgttcgagtgttttgatcgactggctgacagcagactgtgaaataaacagctgcttggatgcctctgagaaattcaatgtggtggcgacgtgataaaatactttgtataattcgtagtttatatccatcattttattagacctcctaataaatattcatcttattataagataaataaagggaaaatacaacagaataaaaaaatccgttgcacaaaatatgaaaaagtagagtaaatattgctgactccgagaaagatacgagaaaacgacaatcaattagcagtgcttatcagattgtttaattttattaattatactaatgaagaaaactatggtaggataaaaacagataatgtaatgaaggtagtatcgtgttttgaacacgtaatacagaaagaggagattatatatgagtaatgtaaagcgcgtatatgtagaaaagaaaccggagtttgctgttgcggcgaagggcctcagacatgagatccgtcattatcttggacttcaggatgtgacaaatgtacgagttctgattcgttacgacgcagagaatatttcagaagaaacatttgaaaaggcatgcaatggtgtgttcgcagagccgccggtagatttcctttataaagaagaattcccgaaaaatgaaacagataaatgtttttccgtagagttccttccgggacagttcgaccagagagcggattccgcagagcagtgtatccgttttattaaagaagatgagactcctgtaatccgtacagcagtcacatatgtaattgaaggcggagtctcagacgaagaactgcaggcaattaagaatcactgcatcaacccggtagattccagagaagctgcagcagagaaaccggagacactggtgacagtatttgatgagccggcagatgtaaagatttttgacggttttaaagatatgccggaagcagaattgaaagagttatatgattctcttggattggcaatgacatttaaagatttcctgcatatccagaactattatgcaggagaagagcacagagatccgacgatgacagagatccgtgttcttgatacatactggtcagatcactgccgtcatacaacgttctctacagaattaaaagatgtgaagtttgatgaaggtgactacaaagagacaatcgaagcaacatataaagaatatttgaaagatcacagcgagattttcaaaggaagagaagataaatttgtctgcctgatggaccttgcactgatggctatgcgccgcctgaaaaaggaaggaaagcttgctgatcaggaagagtctgatgagatcaatgcatgtagtatcgtagttccgatcaaggttgacggagtagaagaagagtggctgatcaacttcaagaatgagacacataaccatccgacagagatcgagccatttggtggagctgcaacatgtcttggaggagcaatccgtgatccactgtcaggacgtacttatgtataccaggcaatgcgtgtgacaggtgccgctgatccgacagtatcagcagatgcaactctgaaaggaaaacttcctcagaagaaacttgttcgtgaggcggctcatggatatagctcatatggtaaccagattggtctggctacaggacttgtaaaagagatttatcatccggattacgtcgcaaaacgtatggagatcggtgctgtacttggagcagctccaagacgtgcggttatccgtgaaaattccgacccgggagatatcatcattcttcttggtggtcgtacaggccgtgacggctgtggtggagcaacaggttcttctaaagttcatacagaagagtctatcgagacttgtggtgcagaagttcagaaaggaaatgcaccgacagaacgtaagatccagagattattccgcagagaagaagtaagccatctgatcaagaaatgtaatgactttggtgcaggcggtgtatctgtagcaattggagaacttgcagacggacttcgcgttgaacttgataaagtaccgaagaaatatgcaggacttgacggaacagaaatcgcaatctctgagtctcaggaaagaatggcagttgttgtagacccgaaagatgtagatgaattcatgggatacgcgaaggaagaaaacttagaggcaacagttgcagcagtagtaacagaggagccaagactcgttcttgtatggagaggaaaagagattgtcaacctttcccgtgcattccttgatacaaacggtgctcatcaggagacaaatgttgaggttgagattccttctaagaaggacagcctttttgtaaagaaagaagtaggagatgtaaaagagacatggctttctatgctctctgatctcaatgtatgctctcagaaaggacttgttgagatgtttgacggttctatcggagcaggttccgtatttatgccacatggtggaaaataccagatgacagagacacaggcaatggtagcgaaagtacctgttttgaacggaacaacagacagtgtatctatgatgagttacggatttgatccatatctgtcaagctggagcccataccacggagctgtttatgcagtgacagagtcagttgccaagattgtggcagcaggtggagattatagaaagatccgcttcacattccaggagtatttccgtagaatgacagaggatccgaagagatggagccagccatttacagcacttctcggagcttatgcggcacagattggtttcggacttccgtctatcggaggaaaagacagtatgtcaggaacattccaggatatcgatgtacctccgacacttgtatccttcgctgtcgatatggctcttgagcaggatatcattacacctgaacttaagaaagcaggaaacaaacttgtatggctcaagatcgaaagagacgagaatgatcttccggtttacgatgcagtaatggatcagtacggcaaattcatggaagatatccagagcggaaaaattgtatctgcatatgcactggatcgtcatggagttgcagcagcagtcagcaagatggcatttggtaaccgtaagggtgccaaaatcgagcacaatgtagataagagagatctgtttgcttctgcatttggagatattatcgcagaggttgaagacggaaaagttggagaactcgcaatcacttatacagaaatcggtgaagtaacagaagagtctgtacttgcttatggtgatgtgaagatcgcacttgcagacgcacaggatgcatggacaggaacacttgagaaagtatttgctacaaaatcagcagcagattctgatgccaaggttgaagagaagctctttaatacatccgatattcatatttgcagccataagatcggacagccaacagtatttattccggtattccctggaacgaactgtgagtatgacagtgcccgtgcatttgagagagcaggtgctaaggttattacaaaagtattccgtaaccttgatgcagaagacatccgtggatcagtagacgagtttgagaaagcaatcggacaggctcagatgatcatgttcccaggtggattcagtgccggtgatgagccggatggttcagctaaattctttgcaactgcattccagaatgcgaaaatcaaagaagctgttgaaaaacttctgaatgagagagacggacttgcacttggtatctgtaacggattccaggctctgatcaagctcggacttgtaccatacggaaaaatcgttggacagacagatgatgctccgacactgacatacaatacaatcggacgtcatatctctaagatggtttatacaaaggttgttacaaacaaatccccatggcttcagggagcacagcttggcggagtttatacaaacccggcatctcatggtgaaggaagatttgttgcaagcgaagagtggcttgataagctgttcgctaacggacaggtggcaacacagtactgtgatccggaaggaaatatcagcatgaacgaagagtggaacgtgaacggatcttaccgtgcaatcgaaggtatcacaagcccggatggacgtgtccttggtaagatggctcactctgagagacgtggagatcatgttgctattaacatttatggagagcaggatctgaagatttttgaatcaggtgtaaaatactttaaataaaatggtaactgtacaccgacgaaatgcgtagcattttggaggttggctctgaacagttacaataaaatataaaataaaataaaaaagttgttgacatctgataggtgttaagtatataataatcaagtcggttgcgacaaagcgtaagtggaaaccgcaaccgacatatgaatatgggatcttagctcagctgggagagcatctgccttacaagcagagggtcacaggttcgagccctgtaggtcccatatctaattaaatatggcgggatagctcagttggctagagcacacggttcatacccgtggtgtcgctggttcaaatccagttcccgctacttatatgggatcttagctcagctgggagagcatctgccttacaagcagagggtcacaggttcgagccctgtaggtcccatatactaactaaatatggcgggatagctcagttggctagagcacacggttcatacccgtggtgtcgctggttcaaatccagttcccgctacttatatgggatcttagctcagctgggagagcatctgccttacaagcagagggtcacaggttcgagccctgtaggtcccatatactaattaaatatggcgggatagctcagttggctagagcacacggttcatacccgtggtgtcgctggttcaaatccagttcccgctactataacgaagactgcgtgcttaagaaattagtacgcagtttttttgcgcaaatttactggttactgcttatatcaggcaaagaaataatagtattaaggagcaacttgtggtaatataacagataatgatatagaaaaaagttgttgtctttcgtttatattttaaaacgtggccaataacagaaatacggaggaaacaagatgaataagaaaagcggatatgcgctcagaatagtacttggaggttatcttacctacctgggtatcagaatcttaagtgagatgatccagcagcgtcctagcaatatgacacttatgtcagtactggcagttgtatttatcctggttggagttgcttatgcagggaatgccatctgcaaaacgtttgaaattgatatcaaaaagcagattgcgaagatgatagcaaagagaaaagcggagcagaaacgaaaagcagaagaagcggcagcggcgaaggaaatgtcacaggtaacagagagcacaacgacagaagcatcagaagacgaaaaagtatcagacaatacaatgccgacaatgctttcagaagaagacaggaagaagctggaagacgcagtgtctaaggcggattccgaggaaaaaacagtatcagaagaaaaaacggtgattacaacagaatcagaggaaacaccggacgaagaaataaaagctgaaggaacaccagttgaagaaactccagctcaggaagaagaactgacagacacaagagtggtagatatttttgcagaactgaatgaagaacctgtttcagaagatgctgaaaatgattttgaggagaaataattatgcgtgtaggtatgggatatgatgttcataagttagttgaaggaagaaaactgatcctgggtggagttgagattccttacgagaaaggtctcttaggacattcagatgcagacgttatgctgcatgccgtaatggatgcactgcttggagcagcagcacttggagacattggccttcattttccggatacagatccgaaatataagggtgcatccagtataaaactgcttgagcacgtaggcagacttttggaagagaatggatatgtgatcgagaatattgatgcgacgatcattgcgcagcgtccaaagatgcgtccgcatattgaccagatgcgggaaaacatggcgaaagcgcttaaaattgacgttgatcagatcaatgtaaaggctacaacagaagagggtcttggctttaccggaagcggcgaaggaatctcatcccaggcgatctgtgcgattgaaaaatttacaaattacagtagcgtggatgtgatggagaagcctgcaggatgtggtggatgctgtgcgggaaaataagatgaagattcgaaagctggaccaatcagagcatgggaaaaccaggagcttgtgggaacaggtattttcagaagacagtcaggaatttgttgattattactattatatcaagacaaaagacaatacgatttatgtaatagaggaagacgatgagatacgtgcgatgctgcagctgaacccttatcaggtaaagttacaggaaagtgtcgttccatcggattatattgtgggagttgccacgcaggcagaatatagaggcagaggatatatgagaaatcttctgattcatgcattacaggatcagtattcgcagaagatgccatttaccttcctgatgccggcggcagaagcaatctattatccttatgatttccgatttgtttatgaacagaaacaaatcgagcttgatgaagcatttttttctgcaagaaaagaatataaaaatgatgaatatagaaatatatcacaagagcggattgtagaccgtgatgcaagatttatggatgcagggaagatggcggcatttgttgaagagaatttttcggattgctggaatgttgttgctttaagaaatgcacaatattatcagacacagattctcgaacaacagagcgagtttggcgggatgcggcttgtctttgaagaagagaagctggtctgtatctatgcatatgcgaaagaagaggggctcgagatcagggaaccactttatctggaagggaaagaagatctcttctgggcgtcggtggatggtcttagagaaccggaagaaaaggtttcggtttatgggcttaaggaagcacctgactggccagatgatgaaacgtctgcatataaagaaaaaccgcttattatgatcaggatcgttcatttacaggaactattttctaaaatgaaaatcccgtcagaatgtgagagccattgctcttttgcggtgatcgatccggttcttcataagaacagcaggatctggaaactcagtagctcaaaaggagaagaaagcctgagcgtgtctgaaacggaagattcacagggagtactttccattgcagcattgacggaaatattgtttggatacaaaactcctgaagaaataagtgcagaggaaagcgtaattcttacagaagaactagaggaagaactgaggaaacttcagaacttctgtccaatatttttgaatgagattgtctgaataaaatgttaaaatacagttgatcggcagagataatagttgacaaaaaatgattttttgcataagataatagagatgttgaaaacaataaatattggtaatagaattgagaaagacaaagaacgggaagagtaacagagatttggactcatagagagaaggtgtcaccggctgaaagcacctttgagagaagaaactgtgaagtgcccccgggagtcgatcctgtgaatggagtagcagggtacgtcaggcacacgttacgtgcgtgaaagtgaaagaagttatacttcttttattagagtggaaccgcggatagaacttcgtctctagattgagacgaagttttttgtatattaggaaagttcctttcctaatatataaaaaacgctccgctcaggatgcgcactgcggcgtacaaggtaggtgtcgcaagcgaccgccgcaggcgcaagaatgtgccaaggcacattctttgttccatatcaggagagaatttttctgatatacaaaataatccgtttagggtgttaagtgcattcttgaatcagaaaggaatgataaatatgggaatgatatcttatgtcaaacaggagatagaggtgatccgagagcgagatcctgcgatcaaatcaaacatggaagtatttttgtacccaagctttaaagtaatcttaagctacagagtggcgcataagctttacctgaaaaagcattatttttgggcacgctggatttctcagagagcagcgcgtaagacagggattgagatccatccgggtgcaacaattggaaagggactttttatcgatcatggaacaggtgtgatcatcggagaaactacgatcatcggagataatgtaacactgtatcagggggttacgcttggcggtaccggaaaagaacagggaaaacgtcatccaacgttgaaagataatgttatggtgagcgccggcgcaaagatcctgggttcttttacaatcggagaaaattctaagatcggagctggttctgtagtacttgaagaggttccaccgaactgtacagttgtcggtgtgccgggacgaatcgtccgcatggacaacaggaaagtcccaagaagtgatatggatcaggtacatttaccggacccggtacttacagatattcgagaactgcaggaagagaatataaaacttcacaaacgtttggaatctatgataaaatatatgcgatgtgtggagaaagaaaataaggagagtaagaacgatgaagatttataatacaatgtcaaaaagaaaagaagagtttgttccactagaggaaggaaaagtaaagatgtatgtatgcggtccgactgtatataattacatccatattggaaatgcaagaccaatgatcgtgtttgatactgtccgcagatattttgaatacaagaattatgatgtgaattatgtatctaactttacggatgtcgatgacaagatcatcaagaaagcaaacgaagaaggcgttacagcagaagaaatctcacagcgttacattgcagagtgcaagaaagatatggacggtatgaatattgagccggcaacaaagaatccgcttgcaacagaagagattgacggtatgatcagcatgattgagacactgattgagaaaggctacgcatacgagaagaacggaacggtatattaccgtacaagaaagttcaaagattatggtaaattatcccataagaaccttgatgatcttcagtcaggcggacgtacccttcttgtaagcggtgaggatgagaaagaagattctctggattttgttctctggaaaccgaaaaaagaaggcgagcctgcatgggtttccccatggggggagggacgtccgggatggcacattgagtgctcagagatgtccaagaaatatcttggtgagcagatcgatattcatgcaggtggggaagacctgatctttccacatcatgaaaatgaaattgcgcagagtgaagcagcgaacggaaaagagttctccagatactggatgcataacgggttcctgaacattgataaccgtaagatgtccaagtctcttggaaatttcttcacagttcgcgagatcagtgagaagtatgaccttcaggtacttcgtttcttcatgttaagcgcacattacagaagtccactgaacttcagcgctgaattgatggaagcagcaaagagcggacttgtgagaatcattacagcagctgatcgtctgaaattccttatgagaagcgcgaagacagaagatatggcagagacagaagcagagaagtttgcaaagtcagcagaatatgttggaaactttgagagtgctatggatgatgacttcaatacagcagatgcgatcgctgcagtatttgatcttgtaaaattcattaatacgatgacagacgaagacagttccaaagagtatcttgagaatctgtttgaccgtctggtaagactgacagaagtacttggaattattgttgataaagaagatgagattcttgattctgacattgaagcattgatcgctgagcgtcaggcagcaagaaaagagaaaaactttgcaagagcagatgagatcagagatgagcttcttgcgaaaggtatcgttctgaaagatacaagagaaggagtacaatggaaaagagcataacagcaggtttagaagagtatatccggacaattcccggtatgaaagagattgatgcaaagcagtgttccccactggttcttgcttatgtgggagactgtgtttatgatctgatcattaagacgatggtggtcggccgtggaaacaggccggttcaccgtctccatgaagagacaagccagtatgtgcaggcatcagcacagtcctttatgatgcgttccatgcaggagcatctgaatgaggaagaacatggagtttaccggagaggaagaaatgcacgatctgtgtctccggcaaagaatcagtcaattacagattacagaagagcgacaggttttgaggcattgatcggacatttatatctgacaggtcagtatgaacgattgacagagcttgtaagtattggacttgaaagcattgaaaaagagataaaggaaaaaggagcagaacatgcaggaaaatagagaacagggaacagagacatttgtaattgaaggaagaaatgccgtactggaagcatttcgttccggacgtacgattgacaagatttatgttcttgacggatgccaggacggaccggtaagaacaattgtacgtgaagcgaaaaaacacggatctctgatcaattttgttacaaaagaaagactttcccagctctcagagacagggaagcatcagggcgtgatcgcgcatgcggcagcatatgaatattctacgatcgacgatatgcttaagctggcagaagagagaggcgaagctccgtttctgattcttttagacaatattgaagatccgcataatcttggcgcaatcattcgtacagcgaaccttgcaggtgcacacggagtcattattccaaagagaagagcagttggtctgacagcgacagttgcgaagacatctgccggagctttgaattatacaccggtcgcaaaggtgacgaatcttgtgaagacaatggaagaactcaaggaaaaaggactctggtttgtatgtgctgatatggatggcgagcagatgtatgacctgaacctgacaggaccgatcggtcttgtgatcggaaatgaaggtgagggcgttggccgacttgtgaaagaaaactgtgatttcgttgcaggaattccaatgaaaggtcagattaattctctgaacgcatctgtggcagcaggtgttcttgcttatgagatcgtaagacagaggatttcgcagaaataaatatgagtattgctcgaaaaaaagagtgataacaggtgataatcggatgaataagtatgacagaatgacagatgagcagcttttatgtgattacaaaaatggaaatcaggagattatggattacctgatggtgaaatataaatccatggtaaggaagaaagcgcgtgcaatgtatctgttaggtggagagaacgaggatctgatccaggaaggaatgatcggtctgatcaaagcagtgcgggattttgatgtaacgcagaaaacatcattttcaagttttgcagaactttgtgtctccagacagatgtactcggcaattgaggcatcaaatcgaaaaaagcatctgcctttgaattcttatgtttcgttatatgaagacagtgaagaggtaggagaggggagaagtcttcctttgattgacacgatagaatcatcgaaggagaatgatccggaagttctttattttggaaaagaatatacagaagcttttgcggagcagctcaaagaattgctcagtccattagaaaatcatgttctttatctgcacttgatgggaacggattatcggacgattgcggaattacttggaaagagtccgaagtcagtggacaatgcacttcagaggatcaagacaaaagcacaaaagattctgccgtaaaggagaaatacggatgaagaaaaaatacaattaccttttggcacttgcagtctttctggtgatcatgatctgctttaacaaattcggatacatcatttcttatctggccgcaattggcgggcctctggttatgggaaacaatggaacaatggtggtttatgagttcctgatgagtcatttgaatctggtatcggcaattttgtaccttatggttctgcctattcctgctttatggtattatcttgcttttcagctgcgtgaaggaggaatccgtgcaatcccaggcaaatgcagaagagtcggattggacggatgcgttttaatcgcgctgtttacttttggcatgatacacgtgaccagtattatactggcaattgtagcacggtcacttccggatgcgatggataattatcagaatctgatagaaaattccggcctgacagaatattcgctgatgtgggttttcagtacattgattcttccacctcttgtggaagaaatgattttccggggtttgatccagaaatatcttgaacgtgccggaatgcattggatcctggcgaatgttgtacaggcggttctgtttggagtgttccatcaaaatctcgtacagggaatttatgcggcacttttggggtttgcacttggatttgtggcgcatcgctataacaccctggcggcatccatgctgatgcacatgttctataatctgatgggaacgctgatcgtagatcttgagagcagattccttccggcaatagtaatgggaatgattattctgatcagtattccgatgacagtgagtgctgtgacgttgatttgtctgacaacaaataataaaaaaacagaggtttgagaagatgagatttgtaatacaaagagtaacagaggcatctgttacgattgatggtgagatatcaggaaagattggaaaagggtatcttgttttgattggagtagcagatacagacacaaaagagattgcagataaaatgatacgaaaaatgatcggactccgtatttttgaagatgaacagggaaaaacaaacctttcgcttgctgatgtggacggaggtcttcttctggtttcacagtttacgttatatgcaaactgtaagagaggaaacagaccaagctttattgaagcaggaaaaccggatatggcgaatgagatgtatgaatatatcattgaaaaatgcagggagtcagtggaggaagtacagaccggagagtttggagctgatatgaaggttcagctgctcaatgacggtccatttacgattctgctggattcagatcagctttaacttgacaatcaaactcaagtagtgtatatttaattttgcgttctgctggaacgcaataagctgtcttggcgcagtcggtagcgcgtcgccttggtaaggcggaggtcgggggttcaagtcccctagacagctttgaacttttccccggaatcgcccgtgaatgcggtgtttccggggtttttcttatttcagcagattcgcgatgcagatcttcaaattttcatagattccaacagaaatctcattgcagattttcctataggtttacgggtttgaagaaaaaatgcaattccttgttgagaattctttcacttgtcatgaaatatgttatactggatttgattgaagtggtggttcaaggtgacgggttctgcataaggggaagccgtatgagcgaaaagaattatgaaacaagtgaattaaaagaactgaaagatgtgttacagacgtttacggagtttgtatgggagatggaagaatatctgccggaattttatcatttttttgatgcgatgaggcagaacatcgagatttttcttcgggtcggcgaagaagatgaagaacagattcatgagattctggaacgggattgggagaaagcacatgcgccgcttgtgggagtacagtgttatgattttcaaggatcacatccggaggcagaagcaggaacttgtgtttattttgcgaatcttctgacagaaatcggtcgtttttttgaaccgatgagtatgttgggagtgctttgaaagaagtgaaaaggagagatggatatggcatcatttttagaagatatcacaccattttatgggacaggagaacggaatgggaaaggacagacactggaagaatttctggaagaatatgatccatatcgatataaaaatccgtgttgtacaacagacacagttgttttctcttataaagatgaacaggcactgaaagaaggacgattaaaggtgcttttggttaagagaggaaatcatcccagtattggctgttgggctcttccgggaggatttgtaaatttgcgggagaatctggaggatacagcaagacgggaactgcaggaagagaccggagtcagcggacttccggtggaacagtttgcctgttatggagattatcagagagatccgagagcaaggattattacaagtgcgtatctttctatcgtaaaggagtcggatgtaagtgtagaggccggagatgatgcggcagatgcagcatggtttgagatagagatggaaccggagacagcatatgaagaagatggatgggaaaagacggaatatcatctgacaattcaaaatcaggatcagaagagaaatgcggttatcctgaaaaaggagcggacaggattggtcagagaaaaatactatgttgtaaaagaaggtggaggaattgcggtggatcatgcagctattctggcacaggcttatgaattgttaaaaggcaggctgcattcagggcaaaacatgcatcttccgtgtccatcagcggagtgattgacacgggagtgaacagtaaccttaaaaggacaactgtaaggggagacgaaaagaatctcttgtggttgttctttttatgtgataagatattgagcatgaaaacctgtaggataaatcacacttccgaaggaatgtgacagatcatccggatggtacttatggttagtaggaggaagatatggagaacgaaacagtttcaaagaattttattgaacaggagatagataaggatctggcagaaggagtttacgatcatgtatgcacccgtttcccaccggagccgaatggataccttcatattggtcatgcgaagtctatccttttgaactatggactggcagagaagtataatggtgaattccatatgagatttgatgatacgaacccgacaaaggagaagacagaatttgttgagtctatcaaagaggatattaagtggctgggtgctgactggaaggatcatctttattttgcatccgattattttgatcagatgtatgagtgcgctgtgaagctgatcaagaaaggaaaagcatttgtctgtgatcttacagcagaacagatgcgtgaatatagaggaacacttacagaagcaggaaaagaaagtccatatagaaatcgttctgtagaggagaaccttgagctttttgagaatatgcgtgccggaaagtatgcagacggggagaaagtgcttcgtgcaaagattgatatggcatcaccgaatatcaatatgcgtgacccgatcatttatcgtgttgcccgcatgacacatcacaatacaggagataagtggtgtatttatccgatgtatgatttcgctcatccgatcgaggatgcaatcgagggaatcacacattccatctgtacacttgagtttgaagatcacagaccgctttatgactgggttgtgagagaatgtgaattcgagaacccaccgcgtcagattgagttcgcaaaactgtatcttacgaatgttgtaacaggaaagcgttatattaagaagctcgtagaagataagattgttgatggatgggatgatccaagactggtttctatcgcagcgctcagaagaagaggatttacaccggagtcaatcaagatgtttattgatatgtgtggtatttccaagagccagagctctgttgattatgcgatgcttgagtactgtatccgtgaggatctgaagatgaagcgttcccgtatgatggctgtgcttgatccgatcaagcttgtgattgataactatccggaaggagaagttgaatatctggatgttgcgaataatctggagaacgaagaactcggacaacgtaaagttccgttctgtcgtgaactttacatcgagagagatgacttcatggaagaaccgccaaagaaatatttccgcttgttcccagggaatgaagttcgtctgatgcacgcatattttgtgaagtgtgaaagctttgtaaaggatgagaatggtaacgtgacagaagttcactgtacttatgatcctgagacaaaggctggaagtggatttacaggacgtaaggtgaaaggaacaattcattgggttccggcaccatatgcacagaaagcagaagtaagactgtatgagaaccttgtagatgaagagaagggtgtatacaataaagaggatggttctctgaacctgaatccaaattctctgaagattatcaaagatgcttatgtggagccaagctttgcagatgcgaaagcttatgatagcttccagtttgtaagaaacggatttttctgtatcgatgcaaaggattctacaccggagaatctggtatttaaccgtattgtttctctgaagagttctttcaaactgccgaagaaataaaaaacggactgccgtgatcacaatgagaaattgttcacggcagtttttcatagttataggtgtgatgcagggagagaacaagaatgtatgaattgacaatgagtttgaatccaaaatcaaaaactccgctgtacgaacagatttatgaatttatcaaggaagagattcagaataacgtaatacagagtggagagcggcttccatctacaagagcattgagtaagcatctggtagtgagcaggagtacagtagaacttgcatatgaacagctcctgtcggaagggtatgtggaggcaatcccatgcaaaggatattttgtcgcgaagatcgaaggtatatatcagcttcagaagaggacggagatcaaagttgaaccgatttcttcaggagtgacagaatacgcgtatgatttcactccgaacggtgtggatctcaacagttttccgtataatatctggagaaaattatccaaagaatgcctgatagatgataaggcagagatgttccgattgggcaatcctcaaggggaatatgggcttcggaatgcgatcagcagttatttgcatcaggcaagaggaatacattgtcatccggatcagatcattattggagcaggaagtgattatttgcttatgcttttaacgacagtgattggaaatggtcataaagttgcgctggaaaacccaacctatggacaggcctatcgtttgtttgaacgattaagctataaagtctgtactgttgatatggatcaaagcgggatgcggattgatgaattagagaaatcaggggcggatattgcatttgtcatgccgtctcatcagtatccacttggatgtgttatgccgatacaaagaagaatggaacttttgaaatgggcagatggggcggaaggcagatatattattgaagatgattacgacagtgaatttcgatataaaggaaagccgattccggcactgcagggaagtgatagcaatgggaaagtgatttatacaggtaccttttctaaatcactggcaccttctattcgaatgagctatatggtgcttccggaacatattttgaaaatttatcaggaaaaatgcagattcatcagttctactgtctccaaggtggatcagatgattcttcagaaatttatggaagaaggctattatgagcgacatctgaataaaacacgcgcattatataagaacaggcatgatgttctgatcagtagccttcggaagatgaaagagattctggaaatttccggagaaaatgcaggtgttcacctgttgctgcattttaagacggatgattccgaaaaggatttgattgaaaaagcagcgaaacaaggtgtcagagtttatggtttatcagagtattgtgtaaaagataatgaagacagtacaggaaaagcggtgattctgttaggttatgcaaacatgaatgaggagagaatccgtgcagcagttcaactactctgtaaggcatgggaatagatgatagaaaaacaggctgtattttaataaaaaagagaagcggatcgttcaattttactaagtgtaagattgaacgatccgttttcttttttattattcattttcagcaatcgtatcatctgattcatcagaaactgctggttgtgtttctgcttcagaagagtcagcgctgtcaacatcagatttttcagttaaatcatctggtcgggctgcctgcaaagatacataagatctttcctgtgttggttcaagatcctgatccagatcaaatgtatcggaatccgtttcttctttattgctatcggtgctatctgcttttatatcagaggatgtactctttgattttttgatcagacgaacagcaagaagtccgattgcagtaccaacagtgccaagtccaactatccatttgattaattttttcaattctatagtctcccttctattaaactaaatttcatactgataaacagtttgctctcaggggaaaaccgcctgatttacttttcattgtaatacttttatcgcagaaatacaatatttctgacatttaaataaaaaaatgcgaaataacattttacaaccctgcaaaagtatagtataattcttaaggcggtaatggttataagtaccgctgattaatattatttacaagcaaacatacgcaggagggtttgaaatggtaaaagcagtagttggtgcaaactggggcgatgaaggaaagggtaagatcacagacatgctcgccagagaggcagatatcatcgttcgttttcagggtggtgcgaatgcaggccatacaattgtgaatgattacggaaaatttgcgctgcatacactgccatcaggtgtgttctatggacatacgaccagcatcattggtaatggtgtcgcactggatgtgccgcgtcttttcgcagaggtacagtctatagtagaaaaaggtgttccgatgccgaagattcttgtatccgacagagcacagatggtaatgtcttatcacaagaattttgacgcatatgaagaagagagactcggaggaaaatctttcggttccacaaagtcaggaattgctccgttctattcagataagtatgcaaagatcggttttcaggttagtgagctgtttgatgatgaacttttgaaggagaaggttgtgcgcgtggcagagcagaagaatgtactgcttgagcatttataccacaaaccactgattaatcctgatgagttatataacgaactgatggaatataagaaaatggtagagccgtttgtagctaatgtatctctttatcttcacgaggcaatcaaagaaggaaagacagttcttcttgaaggacagttaggatccatgaaagatccggatcacggaatttatccaatggttacatcttcctcaacacttgcaggatacggtgcgatcggagcaggaatcccaccatacgagatcaagcagatcgttacagtatgtaaagcgtactcaagtgcagtaggagccggagctttcgtaagcgagatctttggagaggaagcagacgagcttagaagacgtggtggtgacggcggagagttcggcgctacaacaggacgtccaagaagaatgggatggtttgactgtgttgcatccaaatatggctgcagaatgcagggaacaacagatgtagcatttacagtactcgatgtacttggatatctggatgagattccggtatgtgttggttatgagatcaacggagaagttactacagaattcccggtaacacatcttcttgagaaggcaaaaccggtttacaaagttcttccgggatggaaagaagacattcgtggaatcaaaaactacgaagatcttccggaaaactgccgtaaatacattgaattcatcgagaaagagatcgagtatccgatcacaatgatcagtaacggaccaggaagaaacgatattatttatcgtaataaataatgaaacagaaatacaggacaggaagtgaaagctttccgtcctgtattttttatatattaggaaagttctttcctaatatataaaaacgctccgctagggatgcgcactgcggcgtacaaggtaggtgtcgcaagcgaccgccgcaggcgccagaatgtgcaaggcacattctttgttatatcaggaaaaatcttttctgatgtaaaaaacgctccattcaggatatacacggaggcgtacaatgtagttgttgctccgcgtggaatctgcacggaaaacaaaaaatagtaataaatcagaaagttcctcatataatatgatgataccagggtcaaaaggtctgaaaccaccggtgcttgcacaaaggtggtgtaatggccttgggacccgcccaatatgagcataaaagtggagcggaagcttcacgatatgcgaatagtgggtaggattgtgggagtgcattgcacgaaacaatccgtaggtatcatagttgggggcttttgcccccaacatcataatatatagctgagaaaaaagaaggaggaattcgatggaacagaacagcaatgaaaaagacagagaaaatttatccatggaagaatatctgaagaggagacaggcagtaaaaacccgggaaacagcttcgcatgtcgcccggggagtagattctgtcagtgcattactgactgcagtattttatttatgatcagaattgtcttttgaatcatctttcaacagtcgtgtgaccagcagcagtccatagagaataacaggaacgaaaatggttgcagcgatagatgctttgagaagatcagaagcaacaggtgaatcaatcagtgcaaaaatcagtgtgcacaaatacattgcgataagaataaaaactcctaacagtgcagaaatacgtttcagttttttcatgtgaccagtcctttcatacgccaatatagtaatagtaacagtatatatcaaataattgtttacggcaaataaaatttgttatataataaaagggcgattgaattcgaagtttaaagataaaggagcaatatacaatgagtgagaaatgtttattagaccagtggcgtgatatggcctatgaccgtaatcttccgaaagatcagctggagaagttctggggaacatactttacaatcgaaagagagatttacgagcagctgctcgagaacccggatgaagaagtgaagggaacagtgaaagagcttgctgagaaatatggacaggatgtcatgacaatggttggattccttgacggaatcaatgacagtctgaagacagcaaacccgatcgagacaatggaagaagatacagttgtaagtcttgcatttgataaagaacttctttacaagaacatgatcgatgcaaaagctgactggctgtatggactcccacagtgggataagatctttgatgcagagacaaagaaacgtctgtatcgtgagcagaaacagtctggtacagttcgcaaggcgaaaaagatcggaagaaatgatccatgtccgtgcggaagtggaaagaaatataaattctgctgtggaaagaacgcataagaatcagattactggcggtatgtattgagagatacataccgttttgtgtttttggatataagtgtatatatttaaaagaaagggacatactgatattgttctaataagattaagaggaggaaatcagtatgccagaattaagctgtaccgtacagacatgtgtacacaattatcagtatctttgcgaactggataagatccaggtgggaggaaacggtgcgaaggatgcaaaggagacctgttgcgatagctttgaagaaagaagagagggaagttatagcaataagacggattcgatgaagtctgtttcagattgctcagacgttgactgccaggcgaaagattgcagatataatgaagagtgcaaatgtcacgcagggaaaattagtgtagaaggcggtgacgcctgccacagcagtgggacagaatgtgcaacatttgattgttgccgtaattgagcatcagataaaagtataaaatcgtgataaatagaaagagatttggaagagaggatcttctgaatctcttttttctactgttgactctattattgcaaccgcgttataatcgtaatatgtatatttaacagaagaaaggaaatgatcgtacatgagtgaatatcgacaggatgagcatacgacagcgaaagaggcgtcaaagactcatacagatcaaagttataggcacaattcgtgggaagagcatgaaaaaagaaggtatagcttcaaagaacagaccataaaaagtatgacgttgttcttcgtagttgcgacatgtatcttattttattttgcacttttgagattgggacagatttcatctgtatttaagcagtttttaacagtggcaaaacctattatttatggactggcaattgcatatttgctgaatccgattgtgaagtggatagaccgtcggatgattccacttttggagaaacattgtcccaaattaaagaagaaaaaacagatatcaagaggagttggaatcttagtatctgtcatcttgatgttggcattgattactacacttctcaatatgatgattccggaattatatggaagtatccgcgacatgattttcaatgtgccgagtcagatgaaccggtttatcaatgaattcagtaaggtgcattcttctgattcaacagttggaaagatgttggagagcatagttgaagaagcaagtgattttgttcagaactggatgaagacagatttgatggagaaagtgaatctgtggatgacacagcttactgtgggaatgattcagatggttcgtgaagtctttaattttattattggaatcattgtctctatttatgttttgtttagcaaagagaagttccagaaacagacaaagaagctgatctacgctgtatttcgtccgggacaggctaacatgattctccagattggcggaaaaagcaatgagatcttcggtggatttattatcggaaagattattgattctctgattatcggagtaatctgttttataggattatcaattctgaatatgccatatacaatgctggtcagcgtgatcgtaggagtgacaaatgtaattccattctttggaccgtatatcggagcaattccgagtgcaattctgattctgcttgcagatccattgaaaggactctattttatcatttttgttattgcattgcagcagtttgatggaaatgtgctgggaccaaagattttaggaaattcgacaggactttcctcgttctgggttgttttctcaatcctgatcgcagggggattatttggtattccgggaatgctttttggtgtaccgacatttgcggtgatttattatattgtaaatatgctggttaattctatcctgaagaaaaaagaacttccaacagatacagagtgctatgggaagaacggatatgtagattccgaaggaatttatatacagaaagaaaaacaggaagagataaaagaaatacaagaagaaaagggagataaggacaatgccgattcgagtacaaaatgatttgccggtaaaggaaatattagaacaagagaacatcttcgtgatggatgagatgcgtgcggcacatcaggatatccgtccgatcagtatcggacttctgaatctgatgccacttaaggaagatacagagcttcagattctgagagcactttcaaactctccgctgcaggtggatgttactttcgtaagagtgacaagtcatgtgtcaaagaatacatcaacaagtcacatttataaattctatgaagcgtttgatgatatcaaggataaaaggtttgacggatttattatcacgggcgcacctgtagaacagatgccgtttgaagatgtagattattgggaagaactgaaacgtattatggagtggacaaagacaaatgttgtgtctacacttcacctttgttggggagcacaggctggtatttattatcattatggaattgataaggtacaacttccggaaaaacgttcaggtttgttctggcaccacgtaaggaacagaaagattccgatcgtcagaggatttgatgataagtttctggcaccgcattccagacatacagaagttccgcaagatctattggaaaaagatgacagaattacaattcttgcagattcggaagaagcaggagtttatctttgcatggcgcaggatggacgtcagatctttgtaatgggacatccggagtatgatagaatgacactggattccgagtataagagagatatggggaaaggattgaatccacagattccggagaattattatccaaacgacgatccagagaagaaaccaatgctgacctggagagcacattgcaataacctgtatacgaactggttgaattattacgtatatcaggtgacaccttatgatctgtatggaacaccgttctaacactgagtttataagggtttcaagcaatttggcatacacactgaattttataaaattacacgtatttacacagcgaaagtgtgtacgcaaaatagtaaataaaatagagccactatatgacataaatatgagaagaaagtgaaaacttgcttctctttttttatgcgaaaatttaatcataaggaggcggtcaaatgttttcagatgcgatacttgttcagatattcagtgatgatcgtctcaatggcatcccacttgaatatcagtcaacggttgttcatgttgtagaagatgtgattgacagaagagtttacactgataaaccgtttgcttcaaaagaagagatacttgaggatgtgtgtgaaaatcagcagctgcagacggatatctgatttatgcacagaaaaataaaaagtatggatatataggaatgacttcaaagaccggttatatagacaagaaagcatcaaagaaggagtggaacttttactgggtatttccatattataagaatgctgatggtaagatgatcgttggacagacaggaaaatatgtttatggtaaagcaaaataggatagaaaaataattagagataaaaaatggccggcaggaaaaacctgtcggtcattttattagtgtcctgaactcaattcctatcgcccaatccagttgtcgaaaggatccggttttacagatatgaaatcattctgtacatccgcgctgttcagcttgatctgctgtcggctcttttcagcagcttcttcagattcaaatagctgatcttccggcattgtcagtgcgccgcaggagccgatcagctgaatgatatagttatccccctgcttgcgtgcaatctttcctttacggattgttgtgttattctcaagaatatatataacatcatctttgttgtacatcatttcacatcctcttcatcaaattccagggtgatatagttgaatctgtcgtccttccagatcttaatgactttgcctttgcgggtcttcaagcgttcccggttcttgaaattcgtgcttgcaccgtaggcatgctcgagcatataccaataggaagtgggaagctcatgttcgacaatctccaaataatcaccgacagagcagcaatccggctgttctgtagtaaagtccattgttcgcatactctcaccttctgtttcgtgtctatagaatctattatactctaaacacagaatatctcaagagaattatttcaccaacttgttttttactttcaagtattttataataatgaattgcagtgcttgcaggcaggaaagaataaacttcctgtatacgggacaagaagaacgagaaaacagataaaagtgaaaataaattggaggttattaacagagatgaatcgaattgcaagatttgaaaaagtgagtaaagaaaagttctttgaagggtggaaagacacatttgagacagcggaagaaaaagagatggaagcaatctacgagtctttaaaactgccgggaagagcgacagccggaagtgcaggatatgacttttttgcaccggtgaagatcacactgaaaccgggagaaaccgtcaagattccaacgggagtccgtgtgtggatggaacaggactgggtactgaagtgttatccgagaagcggactgggattcaagtacagactgcagctgaataatacagtaggaattatcgacagtgattattattattccgacaatgaaggacagatctttgcaaagatcacaaatgattctaatgaaggaaaaaccgtagaagtagaagcaggagatggattcatgcagggaatcttcgtacagtacggaattacattagatgatgacgtgacagaagtaagaaatggtggatttggaagtacaacaaaaaagaaataaaaggctgacagaataatttgtaagaaaaagggaaacctaaactcagtgaagccaaggcaaataagaggcagaaaaaagagggttaggttttatgatcaaaaagattaaaaaagaagtcggttgttcttttaaagaaaatattcaatatatggatcagacccttccggtggagaaaagctttgacattatccgccgggagatggagatcggtggaaaagaatcggtattctactacattgatggatttataaaagatgaagcaatgttaaagattatggattcttttctttctattacagcagaagatctcccacaggatgcggaaactttttcaaaacagaagattccttatgtagaagtggatgtgctgaaatgttttgatgatattctgaggaatgtactctccggtacagcggtgttttttgtagatggttatgatgcagcactatgtatggattgcagaagttatcctgcccgtggtgtagacgagccggataaagataaatcacttcgtggttccagagatggttttgtagagacaattgtatttaatacggcactgatgcggagaaggatcagagatccacatctgattatggaaatgacagaagcaggtcagagttccagaacggacatagcagtctgttatatgtcagaccgtgtagatgaagaacttttaaacaatataaaatcaaggattgagaaacttgaggtagatgacctgagaatgaatcagcagagtcttgcagaagcacttttcaagagaaaatggttcaatcctttcccgaagtttaaatttacagagagaccggatacggcagcagcctgtcttttggaaggaaaggttgtgattctggtggataactcgccgtcggcaatgatacttccaacgtctgttctggatatgatagaagaggcaaatgattattattttccgacgttgaccggaatgtatctgaagatttccagaaccctgatcacaatcgcaacggtgttttttacaccattgtatctattatatatgcagaatccgcagtggctaccggacgttttttcatttgtaatggtgcgtgatcagatcaatcttccattgatctggcagtttcttctgcttgaactgtcaattgatggtttacggctggctgcgatgaatacgccaacgatgctcagtactccactgagtgtgatcgcaggtattgtgatgggagaattttcggtagaatccggttggttcaattcagaagtaatgctatatatggcatttgtggcagtggcaaattatacacagccgaatttcgaacttggatatgcattaaaatttatgagactgatgcttcttgtactgactgcagtgtttaatctgtatggatttgttgtgggatgtattttggtattatgtttcctcgtgtttaataaaacactttcaggaagaaattatctaaatgtaaaaattaactgacaaaatcttaattttgttaatatatctttgctctttattataaaagatggtatgatatagaaaatattgcttatccggaaaatacatgtctgctatatggaatgtagtggtggtttccggaagaaagagagcaggaggttattgacatgagagagttcattattaccgtgaacagtactgtagacttaccgaaggaatggctggaagagagacatgttccggttcttccgttgaaatatacgattgatggagaaacttacacagatatgtcaggattgacagcaaaagagttctttcagaaattaagagaaggccatatgtctgtgacttctcagatcaatccggaggaagcacgcgagatgcttgaaccgtttgtgaaggaaggaaaagatgtacttcatcttggattctcttccggattaagcggaacatgcaatagtatgcgaatcgcggcggaagaactggcggaggattatccggaagcaaagattatcgtgatcgatacactttgcgcctgcctgggagagggcttgcttttgtactatgctcttaagttgaaagaagaaggcaagacgattgatgaaatcgcaaagtgggcagaagagaacaagcttcacgtttgccataatgttacggtggatgatctgaatcatctgcagagaggtggacgtatttccaaagcggcagcagttttggggacactcgtgcaagtgaaaccgatcatacatatggataacaatggaaaacttcaggtgattgcgaaagaacgtggtcgcaagaagtctctgaataaaattgttgatatggcagtagagcagtcaaaaggctgggagaatgagatcataatgatcacgcacggagattgcctgaaagatgcagagtatgttgccggacgtgtcagagagaagatgggaatagagaatattctgatcaataatatcggaacagtgatcggaagtcatacaggaccgggtgttattgccgtattctgcatgggaaatgaaagataaatttcgaaaaaaataaaaaaacaaaagaaaatgcatttaaagtgttgacaggaaagagtggatatggtaaattagatgttgcgttaagcaaaaaacaaagtagagtatccactctcaccgcagcacaattgagtgactgatggtccgatatcgataataaggagctcctgttggagttattacatttgtcgggtggatatgatattcactcgtttttttgtgttttcgcgtaagaacctaaaggaaattcatttgacggaggtatacgacaattagcgatttaatgattaacgagcagatcagagataaagaagtaagattgatcagcgcggatggggaacagttaggcatcatgtcatccagagatgcaatgaagcttgcacaggaagcagagcttgatctggtgaagattgcaccgggagcaaagccaccggtatgtaagatcattgactatggcaagtacaaatacgagcagactcgtaaagagaaagaagccaagaaaaaacagaaaactgttgaaatcaaagaagtgcgtttatcaccgaacattgatacgaatgacctgaataccaaagtgaacaatgctaagaagttcatttccaagggaaataaggttaaggtgacactgcgtttcagaggtcgtgagatggctcacgtacagcagagcaagcatatccttgatgattttgcaaagcagctggaagatgttgctacagtagagaaggcagcaaaactggaaggcagaaatatgagtatggttttagctgaaaaacgttaagacaatatgatccgggatgaagatcctgtaaggcagcacaataaaggaggaaattatcatgccaaaaattaaaacaaatagagcggcagcaaagcgcttcaaagtaacaggtacaggaaagctgaaaagaaataaagcttacaagagccatatcttaacaaagaagtctacaaagagaaagagaaatctgagacaggcaactattacagatgcaacaaatgtaaagaacatgaagaaggttttaccatatctgtaagatttggaagtagattaaggaggagattaggaaatggcaagaatcaaaggcggaatgaacgctaagaagaaacataacagaacactgaaactggctaaaggatacagaggagctcgttccaaacagtacagagtcgcaaaacagtctgtaatgagagcactcacatcttcttacgcaggaagaaaacagcgtaagcgtcagatgagacagctttggatcgctcgtattaacgcagctgcaagaatgaatggactttcttacagcaaattcatgtatggtcttaaactggctaacgttgacatgaacagaaagatgcttgcagagcttgcagtaagcgacagagaaggattcgcagcactcgcagcagtagcaaaagagaaacttgcttaatttgagcttgtattttcgcccggttttcttcggaagaccgggttttcttattgtattaattgtatataaaaaataaatttttaaaaaaattaaaaaaactgttgacatttaatgccgcaacgtgtattatagtcgttgtggcaaggcggtaacgcagatgaccacggtaaaatgatgatatgcggaagtgtcggaactggcagacgagcaagactaaggatcttgtgatcaatgcgatcgtgtgggttcaagtcccatcttccgcatcattttcaaaaaaatattttagaaatgcggaagtgtcggaactggcagacgagcaagactaaggatcttgtgatcaatgcgatcgtgtgggttcaagtcccatcttccgcatcatttcaaaaaatatttcagaatgcggaagtgtcggaactggcagacgagcaagactaaggatcttgtgatcaatgcgatcgtgtgggttcaagtcccatcttccgcagtaagataagaccaagagtacagaacaaagtattcttggtttttttatatattaggaaagtcctttcctaatatataaaaccgttctgcttggaaaataatattggaaaagaaaaaaagaagaaaataaaaaaataaaaaggaaagagaagagttttgtcgaatatatataatagagtattctttaaacattaagcggaggcactcatgtactactcagaagaactgattgaagaagtaagatcaaggaatgatattgtagatgtgatttccggatatgtccggctgcagaagaaaggcagctcttattttggattatgtccgttccataatgagaaatcaccgtctttttctgtgagcagacagaagcagatgtattactgctttggatgtggggcgggagggaatgtttttacatttcttatggaatatgagaatttttcttttgtagaagcagtgaagtttcttgcggacagagcaggaatcgaacttccggagatggaatactcgaaagaagcgaaggaaaaagcagatttaaagtctacgattcttgagatgaataagctggctgcaaagtatttctacgtacagctgaaatcagagcgtggaagtcaggcctacagttatcttaagaaccgtgaactctcagatgagacgatcacagcgtttggactgggattttcgaacaaatacagtgatgatctgtataagtatctgagagagaagggatacagtgaagacctgattcgacaggccggactgatcaacacggatgaacgtcagggtgtgtacgacaagttttggaatcgtgtgatgtttccaattatggatgtcaataaccgtgtgatcggatttggtggccgtgtgatgggagatgggaaaccgaaatatctgaattcaccggagacagtcgtttttgataagagccggaatctttatggtctgaaccgtgccagaacatcaagaaagccatactttcttctttgcgaaggatatatggatgtgatttctctccatcagtccggatttacgaatgcggtagcttcattggggactgcattgacagcagggcatgcagctctgatcaagcgttatgtccaggaagtttatctgacttatgacagtgatgaagccggtacaagagcagcacttcgcgcagtgccgatcttgcgggaggccgggatttctgctaaagttgtaaggatggatccatataaagatccggatgaattcattaagaaccttggagcagaagaatatgagaagcggatccatgcggcgcgtaatggattcatgttcagcctggagatgctggagaaacaatatgatatgaattctccggaaggcaagacagatttcttcagggaagtgtcgaggagactgcttgaattcgaagatgagctggagcgtaacaactatatcgaagctgttgcaacagcataccgggtcagccgggaaagcctggagaagatggtcgcaaagatggctgtgaatgccggaatggcgagaccggtcgcaagaccgaaacgggcagaaggatctgagaagaagcaaaaggaagacggaatccttacttcacagaaagcattgttgacctggatgatcgatgatgacaggctctttgatcagatcagtcagtacataagcccgggtgattttacagaaagtctgtatcggacggttgcagaacttttatatgagcagagaaagcagggagccttgaatcctgcgaagatcctgaatcatttcacagaggaagaagatcacagagaagcagcctctttgtttaacacaagaattaaagagctgaagacaaaggaagagagagaacaggctttacaggagacgatcctgcgggtgaagagttatagcattgagcatcagacaatgaatctcgacccgacagatatgcgggggttacagcatttgatggaagaaaaacggaagctggagaacctgaagaatttgaatattacaattcaataaggataaaataaaacaagacaggctgcggatgcgcgcagcgaaggaaggaagaacacatggacgatattacacagaaatttcttgatagattgaaagacctggttgcacttggtaaaaagaaaaagagcatactggatgtccaggagatcaatgattttttcaatgatatggaactcaatgcagatcagatggagaaggtatttgattaccttgaggcaaataacattgatgtgctgcgcattagcggagatacaccggatgaggtggatgtagatctggatgacattatcatatctgaggaagacgacgtggatatggagaatatcgacctgtcagttccggaaggcgtgagtattgaagatccggtccgtatgtatttaaaagagatcggtaaggtacctcttctgagtgcagaacgtgagattgagcttgcacagagaatggaagaaggcgatgaggaagccaagaaagagcttgcagaagcgaacttaagacttgtagtcagcatcgcaaagagatatgttggaagaggcatgctgttccttgatctgatccaggagggtaacctcggcctgatcaaagcagttgaaaagtttgattatcacaagggatataagttcagtacttatgctacatggtggatccgtcaggcaatcacaagagcaatcgcggatcaggcaagaacaatccgtatcccggttcatatggttgagacgatcaacaagctgatccgtgtatccagacagcttcttcaggaactgggaagagaaccgcttccggaagagattgccaaggagatggatatgccggtagaacgtgtacgtgagatcctgaagatttcacaggaaccggtttctcttgagacaccgatcggtgaagaggaagacagccaccttggagactttatccaggatgataatgtaccggttccggccgaggcagctgcacagacacttctgaaagagcagctggatgaagtgttggatacattgacagagagagagcagaaagtcctccgtcttcgtttcggaatgaatgacggaagagcacgtacacttgaagaggtaggacgagagtttgatgtaacaagagagcgtatccgtcagatcgaggcgaaagcactccgtaagctccgtcacccaagcagaagcagaaaactgagggattatctggattaatgatggaattatcgaaaagattacaggcggtcgcagatcttgtgaccgcccattataaattagcggacattggaacggatcatgcatatattccgatttatctgacacagcagaagaagattacagaagcagttgcacttgatgtcaatgaaggaccactgcagcgagcagaggaacatatccgcgagaatggacttgaagcagagatagagacaagactttccaatgggtttcaggcattacagccgggagaagtccagtctgcggtcatcgcaggaatgggcggcggacttgtgatccggatcctgacagaaggagcggaagtggtgcaaaagcttgaggagtgtatccttcagccacagtcagagattgagaaagtgcgagcatttcttcttgagaagggatatgaatttctggaagaagatatggtctgtgaagatggaaaatattatcctatgatgaaggtgagaccaccggtagctgatacagcaggcgaagatacagaagtaaagtgctgggatacggttcagttaaaatatggaaagcttttgctggagaaacaacatccggtactcagagagtatctggaaagagagatacgcatttatcaaagtattttagaaggattgaaagcgaaagattctgaccggatccgtcagagaaaagaagaattggaacaggaacttgtagaagcagagaaagggatgaaatattatgcagtgtaaagagattatacaggtaatagaggcaacattcccgcgaacagcagctttgggatttgacaatgtaggactgcttgcaggacgttcagagaaagaggtgtccagaatttatctggcactggatgcaacagatgttgtgatcgaccgtgcgatcaaggaaggtgcggacatgctgatcacacatcacccgcttttattctcagcagtaaagaaagtgacggatgaagattttattacaagaagaattgtgaagctgattcagaatgacatttcctattatgcaatgcatacgaattatgatgtgcttggtatggcagaactgtccggaaagatcatggaccttcagaatggggaagtgttagatgttacctatacagatgaagaagggaatccggaaggaatcggaagaatcggtaatctggagaaagatatgacattggaagagtgctgtgtctatgtgaaacacagacttgaacttggaagtctgaaagtatttggagatatgcagaagaaggtgcatcgtcttgcaatttctccgggatcaggaaagagctcgattgcagttgctctcgagaagggggcagatgttcttgtgacaggagatatcggtcatcatgatggaattgatgcagtagagcaggggcttgcagtaattgatgcaggacattatggaacagaatatatttttattgaagatatgaagcagttctttgagaagaagcttccggtgctggatgtacttacagatccaatcgagcatccgttccagatcatataatcagaagtgaacgcataataatgttcagcagggcagctgtgagcggaaagcagttcacaaagacagtggaggtggctgagagttggaaagtcagaaatgtaaggttacgataagcggaaaagagtatctttatgagaaggggacgtcttatcaggagatcgcgaaggattttcagaaagagtataaacatcagatcgcacttgtgatactggatggacatcgtctgcaagaacttaggaaacaggtttccggagactgtacgctgcaatttattacaacacaggatacggcggggtatgacacgtatcggagaagtgtctgctttctttttattaaggcagtacacgatgtgattggccatgagcgtccgcagcaggtgcgtgtacggattcatttttcgttaggtgcaggattttactgtacggtggaaggaatcgatcatgtgggaatggaattccaatggaaagttgaagaacgcatgtatgaacttgtacagcagagacttccgatcacaaaagagttgatccatacagaagaggcagtggaattattccatcgatatggaatgtttgataaagaacgcctgttccggtatcggagaagttcccacgtgaatctgtatgccatgaatgaattccgtgactattattatggttatatgatgccggatacaggagatttgaagtattttgcattgtatctgtatcagggcggaattgtacttcagatgccgctgaaagacgaaccggagaaagtccctttatttgtgccaaaggataagctgtttcgtgtactcagtgagtctgtgagatggggagaccagcaggggattgataccgtcggtgcgctcaatgacatgatcacacaggatgatatgcgtgagattgttcttgtgcaggaggcattccaggagcgcaagatcggagagatcgcaaagcagatcgcagatcgtccgggggtaaagtttgttctgatcgcaggaccttcttcttccggcaagacaacattttcacatcgcttatccattcagctcagagtgaacgggcttcatccacatccgatttctgtagataattatttcgtagatcgggagaaaacaccgaaagacgaggatggaaattataacttcgaatgcattgaagcaatcgatgtggaaaagttcaatgaggacatgagcaatctgctggcaggcgaggaagtctatcttccggtttttgactttaagaccggtaaacggagttttgaaacaaagccaaagaaactcggtgaaaatgatatccttgtaatcgaaggaatccattgcctgaatccgaagctgacagaacagttatgtgatgaccggaaattcaggatctatatcagtgcattaacacagctgaatattgatgagcataaccggattccgtctacagacggacgtttgatccgaagacttgtcagagatgcaagaacaagaggggcatcggcgacgaagaccatctcaatgtggccgtcagtgagaagaggagaagaaaagaatattttcccatatcaggaatatgcagatgtgatgtttaactcttccctgatctatgaactggcagtgttgaaacagtatgtggagccgttgcttcttggtgtaagtaaagactctccggaatatgttgaagcaaagcggttgttgaaattcctggattatttcgtaggaatcggaaatgacaatgtgccaacgaattcacttttgagagaatttattggtggtggatgtttccatgtctaatgcaatagaaagatagaagaaagaggatacatagaaaacttgtatgtgacaagaatttctatgtatcctctttgcattaagatacctctttgttaatcatatcctgcaataagcagaaatatacaatatctaatcctaaaatcgagagaaccaggtagagaatagaagaattcccctgtattcctctgatgcggtcacagcgttctcccatcttataagcccagtaaataccatagattccacaggtgatcaaagaaaataggaataccatgcctccgcttgttgcctgtggctctccggccagctgattcacctcatcattcagcttgatcatccagtagatactgtagatgccgcaggtgagaaaagaaaaaacaattgcaagtacaagattacgtggcataatgcctgcagttgccccgttccggtaataattgttctgattatagttgttctggtatgcattctggtaatatgcattctgctggaactggctttcctgctgcttttgattctcctgtgtatgagcattatcattaggagtgggaagcggagcaccgcattcctgacagaaagaagcactgtcttcgcagagtgaattacattttggacagattttcatagaagattctcctttgcatgaattagttcgaaaaatgtcagaagttgacaagatccttctgaaaagtatcgtatcataaaaagatacaagttacaagaaatgtagccaagttttaggatatcttaagatattcgatagaaataaacctggaatatgcataatattcttcctttttctttcaaaaagtttgtggtagaatagtaatgtttctgaaaacaaaacacgaggagatgaaagtatgccagtatttgactttaacagtgcaccggaagataagaaagaagttcagtgtacttatacaacattttgttccaacgaagaccatgcgacaccggagtgtccgattcttgttctggataaccagaaccggaagtggaaccatcattcctgcggtgtgtttaccaatcagaataagcagaccgcatttgagtttgatgaaaaggacggaacatgcagcgcagatatcctgaaagtggatgcacgttttgtcagtcttttaaaatggcttggagaaaatcacatcaatgtacgtctttccggagaaaataagccggatggttatgccgtttacagaatccgtgagattgcatttggaggcggaacaaaattatctgctgaggacggcttccttcagtttatgattgagcggttgtttgcaagtgatgcgccaaaagaaaagatcaatgatgacgagcaggaagagtccggagatgacatgaagcttacaagtattcagagtattacagactttatgacgtgcgcaggacgtacacttccggataacattcgtctgtgggcaagaagaaatcttgcagttgcacgctctcacgaggtctctcaggaagagcgccgtcatgcacagagagcactatctatcatgatgaatattcagtggaagagtaattactttgaagcaatcgatccggatgaagcgagaagaattctggatgaagagctgtatggaatggagaaagtaaagcagagaatcatagagacgatcattcagatcaaccgtacacacacacttccggcgtacggacttctgcttgtcggaccggcaggaacaggtaaatcccagattgcttatgccgttgcaagaatccttaaacttccttggacaacactggatatgagttccattaacgatccggaacagctgacaggaagttcaagaatctattcaaacgcaaagccaggtattatcatggaagcattctccatggcaggggaatccaatctggtattcattattaatgagctggataaggcggcatccggaaagggaaacggaaacccggcagatgttttacttacactgctggacaaccttggatttacagacaattacatggagtgtatgattcctaccgttggtgtatatccaatcgctacagcgaatgacaaggatcagatcagtgcaccgctcatgtcccgtttcgctgtcattgatatcccggattatacaccggaagagaagaaagtaatcttctccaaattcgcacttccgaaggtgctgaaacgcatgagcctgaaggcagaagagtgcattatgacagaagaggcactcaatgaagtgattgaactgtactccaatacatcaggaatccgtgatctggaacaggcagcagaacacatcgcagcgaatgcactgtatcagattgaggtgaatcatgtggagaaagttgaatttgatgcagagatggtaagagaactgcttggatagagttaggtttcgccctcgatctgaaaaaaatgagctctggaaagttttgactttccagagcttattttttgaattcttactgtctataatactgcaggaactccccaatcttaccaaccgcctctttcagcacttcaatacgcggcagataaaccacacggaaatgatccggctgatgccagttaaatccacttccctgaacgatcaggatcttcttgtcacgaagcagatcaagagcaaatttctcatcattcacaatattgaacttcttcgtatcaatcttcgggaacatataaaatgcagcttgaggttttactgcgctgattcccggaatatccgtcagagccttgtaaacatattcacgctgctcgtaaatacgtccacccggaacaatataatcatttacactctggtgtccgccgagagctgtctgcacaatggactgtgccggaacgttagagcaaagacgcatgttggaaagcatcttgattccttcgatatagtctcttgcaatatttttatttccacttaagatcatccatccgatacggaatccggcgatcatatgggacttggacagtccgctgaatgtcacgcagaacagatccggtgcgagagaagcaatagaaacatgctcttttccatccataacaagacggtcataaatctcatcagagaaaatgatcagctggtgttctcttgcgagatctacaatctgctgcagtacttccttcggataaagagcaccggtcggattgtttggattgatgataacgatcgcttttgtacggtcattgatcttcttacgcatatcttcgatatcaggataccagtcagactgctcatcacagatatagtgcacaggctttccaccggcaagtgtagcacaagctgtccagagcggataatccggagacgggataagaatctcatcccctgtatccaaaagagcagacatggtaagattgatcagttcactgacaccatttcctgtgtaaatatcgctcatcgttacattcggcaggtgctttaactgggcatactgcatgatcgcttttcgcgcagagaacagaccggcagaagcagagtagccttcgcagtcagaaagctgacggctcatgtcatagatcacctcatccggtgtacggaagccaaacggagccggatttccgatattaagcttcagtacatgagttcccatctcttccattctggcagcctcatcaacaaccggacctctcacatcatataatacattatttaacttggatgatttcttgaattctctcactttcatacctcctgaattatctgcggatgtctgtatcttatcaacatctgacagtgtggaatcattatcattattattgtttaaccagtcaggatcaacctgcagggcatctgccagaaaatgtaagatgtcagtacgcgggattgtcttcccactgacatactggctgacatgacttttcccaagcttgatccctttctgctgggcaagacgaacaagatcaacctgcttcaggccttgctcgttcatagcggcttttaatctgtctgcaaaggtttccataaagctcctttctggggttatccttccggggatcagaccccattaataaagtattaacaaaatacaaagttcaatttaaaatctgcttcaatacgaaaatctctaaaaagttcaatttaaaagttcaaaactttagtcagagtataccacgataaatgaaaaagttcaataaaaaaattactgttatagaaaatccgcaaaatcacggtatcattaagaaaatatgatatactaaaagtgtttattacaacaaaatacaaagtacacagaacgaagggaaacagggaaatgattcttgaaaatgaaaaaataaaacaggcattggaatatataaaggaagaagatccggcaacgactcaggacacgctcaatatgtgtcagatcccggcaccttcttataaggaagagaaaaaagcggagtatatccgggagcggttctgggagatcgggcttagggatgtcaggattgacgctgttggaaatgtgcttgggatctggccgggaaccggtgaaggaccaagtgtaatgcttgcagcacacacagacacagtattcccggaagggacagatctgacgataagaaaagaaggaaatcgttattattgtcccggcattaacgatgacacacatgcagtggcggagatgatcgcagtagcgaaagcaatgatccatgcagatcttcacacaaaaggagacttgatcttctgtgcaaatgtgtgtgaagaaggacttggagatctaaggggcgtgaagtatctgttcggatacgacaacaaagcttcagaagaatgtccagaggtagatgcatttgtctcgattgataatcagtatacgggcggggtgatctatacggcaacaggaagtcaccgttatgaggtgacatttaccggaagaggtggtcacagtttccagaactttggcattcccaatccaatccatgcaatgggacgagccatcgcacagatcgcagaattccaggtcccgaatgagccgaagacaacatttaacgtaggcgtgatccagggaggaacttctgtaaatacaatttcaggttctgcatccatgctggtagacctccgttcggacagcgaagaagagctgaaccgattggacaaagaacttcataaagtgatcaaacaggcagtggaagaagaaaatgcaagatgggatgcttcaaagccgcagatcaaagtgcagatcgaaggacgcggtgtgagaccggcgggggcacagccaaaggattgtgcgatcgtgaaagcagcattccgggcggcagaactgctggggattgaaccggagtatcggtatgagagcagtacagatgcgaatatcccgatcagtatgggaatcccggcaatcactgttggaagaggtggagaagaagacggaatccatacccttcaggaatggtatgagccaaaagaagcatggcttggaccacagagagatttgcttctgatgattctgcttgccggggcagaaggagtctgtgagccggctatagaaaaaagataaaaaatcttaagaaaatatcaatgtctttttaggcacatttcctgtatactgatggtatgagagaatattttgtgcagattgtaccggatgtcccggagattttatcttttgcacaaaaagaagaaaaataaaacaaagcaggagggcaaaagatgcggggaatcagaaagcagtcatccgacacacagagctccagtcagccgaaagaaaaaagaagattggatacaaaacagaaaaaaggagtgttgatcggcggaggaatcttccttgtggcagtaatcgccctgatccttgtgaagaatctgacaggtggaagcggagcagatggagagaatgttctttatgcggattccgttggaatgatcacagggacaggacttgggacacagaaccgttttacaggagtggttgaagcacaggatacgttgaaactgacactggcagacaaccagaaggtaaaacagatctttgttgaaaaagggcaggaagtagagcctggaacaaagttgtttgaatacgatacagaagagcttgccatgacattagatcagggaaaactggagcttgagaagatcacgaacaacatcagcagcctgaattcacagatcgcgacacttacaacggagaagaagagtgcgccggccagcgaacagctttcctatacgacacagatccaggaacttcagatggagatcaagcaggaagagtacaattataaagtaaaagagctggaagtaagccgtacacagaagagcctggaacagtctacagtaacttctacagttgccggaattgtacaggagatcaacgaacagcagggaacagacccttctacaggagagtcccaaccgtttatgagtatcctttctacaggaaaatacagaatcaaaggaaagataagcgagcagaacatcggagatctgacaccgggcacacaggtgacgatccgctccagagtgaatgaagatgagatctggacaggtacagtagataacgtagacacagagaagccggagaacagttcccaggattctatgagttatggttctgagaacagcgataatcaggcaacaaagtatccattctatgtcacattggatacaatggatggattgatgctcggacagcatgtctatatcgagacaagtacttcactggaagcagacaagatgtggctgatgcgtgactacattgtagacgcagattcagatcatccatatgtatgggtagcaggagataatgacaagctggagaagcgttctgttacactcggagagacgaacgaagatatgggaacctgtgagatcgtagacggactgaaagcttctgattacattgtatggccaagcgaggagtgcaaaaaaggtgcagctgttgtgaagaacgattcaggtacatcaggcagtacttcagatatgtcaggagccgagggcggttacgaagaacctgtagaagaaaatgcaatgcaggaaggagttccgggaacggaggagagtgtggatgaataaaaagaaaataataaagatcggcattcctgtggcagcaggctgtatcgttcttgcacttggaatcggtttcgcagtgaagaacagcggaaaggctgttaaagtagctcctgtcagtagtttgaattccggcggctggtacgatgatagtgggattgcaagttacggaaccgtcacaacgaaccagaagcaggacatttacgtggatgatactatgccgatcacacaggtttacgtgaaagccggggatacggtgaaagttggagaccgtcttgtggcatacgacacgacactttcttccctggagcttgagatgaaagaaatgcagattcaggggattgacctgaacattcagaacctgcagaaagagatcacccagctcaaggggacaaagaccgcgaaggcagatacaggggtatccgtcgtgcagacaagcacagctggagaacagcagccaacggtacagaagatgagtgctgtaaagacaaccattcttaatacatcaaaagaggatgagaataaaaaaccggatggcgatacctcgaaggatgatacgacaaaagacgacaacacaaaagatgatacctcaaaagatgatacttcaaaagatgatgcttcgaaagatgataatgcgaaggatgacacatccaaagatgataataaaaaagacgacgtaccgtcttccgcaattgagcgtccattccctgaagcattaaagggaaaagaggtttacagtgagattacattagattctgttccttataataaagaagacgcagacggaacaatggaaaaaccgtatcgttatctttgtgcaccgggggcagccgtaaatgcaccgtttatgctcaaagtattaaaagagggtcaagtgtgtgcctttgatgtagtagataacgcagaagcgccgacaaaattcttatcctgttggatcctcgatggaaaaacaggacaggtagtcataccggatccacaaccaactccagacccggagccgactccaaatccagagccaactccggaaccagagccaactccggaaccagagccaattccggaaccagaaccaactccggaaccggatatttcagaagatccggttatcccagacaccccggacctcccgtcaaaggaagaagtgacgaagcaaatcaaggagaaagagcagaagatcaaagatctggatctttccaggagatccgctgaactggaactgaaaaagctgaagaaaaaggtcggggacggcgtgatcaaaagtacggtagaaggtgtagtcaaagaagcgactgacgaagcgtctgcaaagaatgagaacaaaccggttgtcagcgttgttggagaagaaggtttctatgtgaccggaagagtcggagagacaatgcttgatcagatcaaagaaggaatgactgcgactgtaatgtcctggcagtcgggagaatcctacgaagcgacagttacaggtgttggcaactcaccggtaagcgattattccacaggagagaaccagaatcagtccttctatccgttcacgctcgtgatccacggagacgcaaatctctcgaatggtgagtctgtgaatctgtcgatgaatggaattgcagcaggtagtgatggatcaatctatcttgaaaaaatgtttgtccgtgaggaaggaaaccgctattatgtctacaagcggggcgataacggcagattaacaaaacagtatgtagaggttggcaaaaatatgtacaattcactggagatcacctccggcctcacaatggatgacctgatcgcgttcccttacggcagagatgtcaaagaaggcgcaaagacacaggaagcagataccctgtacgactattattaagaggactgaacagtatcaaaatgaaagagagtgaggtgccattatgttagaagacatcagactggcgtttcagggaatctggaatcataaattaagatctgcgctcacaatgctcggaatcatcataggaatcggttccattatagcaattgtgtccacgatcaaaggaacgaatgaacagattaagaagaatctggtcggtgcaggaaatgacgcggtaaatgtacagctctatcagggtgactggccgatcgatctgcagtatcagtcactcccggacggagtgccggagatctcagacgagacattgcaggaagtcgttgaactcccggaagtggagacagcgtctttatatcatacaagaaatgaatacgacgcagtttaccgcggcgcaaagtcattaagtaacagcgtgattctcggaattgacagaaattatctggatgtttacggatatcaggtgaccaaaggaagaggattaacagacaaagattattccgaaggacgaaaagtagccttgatagacaagacaacagcggcaagtttattcgacaatgcagatgtgatcggaagaacgatcgaaattaaaggagaaccttttgttgtcgttggaatggttgcaaagaaagcagagtcccagccggtaatcaactcaatggaagattactaccgctacatgtcagatgaccagagtggaaagatcattattccggataatgtatggccggtcatctaccagtatgacgaaccacagaaccttgtcgtgcgtgcaaaaagtacagatgatatgacaacggcaggagagaaagccgcagatattttaaatgctatgctgacagtttcagatgataccgtgaaatacaaaggagaagatctgttagaacaggcaacacagatccaggagatcagtaactcgacaaatcagcagctgatctggatcgccagcatttccctgttagttggtggaatcggagttatgaatatcatgctcgtgtcggttacagaacgtaccggcgagattggattaaagaaggcactcggagcgagaaaacgcagaattctgacacagttcctgacagaggcggcggtgttgacactgcttggaggaattataggtgttcttggaggaatcgcacttgcgtacattatatccaaagtctcagcagttccggtagcaatcagcggagtttcgattgtgatcgcagtgctgttctccacactgatcggtattatcttcggactgatcccgtccgtgaaagcggcgaacatgaatccaatcgaggcacttagacatgaataaaaaaacagtagaaaaagaaaatacttgtttcaatttccttccatatctgttatagtatgtgttaattaaaagagtcaggagaatctgagtgatcggattctccgtctttctatgcaaagagaaaatagcaattattaaaaggaaaagagaaaaggggcatgtagatttgagcagcagtacattagagggaaagaaaaagacagagaacggaacaaagaggctgatcttcacagcagtatctatcttgctggagatcgtcttccttctctttctgttcacaaaggtaagtgaatacgcaactattattgactgggcaacaagaattgtggcaatctttcttgtgcttggactttacagcatggataagacttcatcaatgaaaatgccatggatcatactgatgcttgcattcccgattcttggtgtgagtctgtatcttctcgtaggtctgaacggaagcacgaagaagatgcgggcaagatatgaagagattgataaaaaactgctcccatatcttccggataacagacagattctcgaatggatgaaagaagagagtccgcaggcgggggcaatcgcttcttatctgacgaattactcttgttacccggtttatcagaacacagatgttacatattatgatgaggcgatcaaagggctggatgcacagctggaggatctttcaaaggcagaaaagttcatctttatggagtatcatgccatcgaagacgaagaggcatggcaacggatccagacggtacttgaagaccgtgtgaaagcaggcgtagaagtccgtatcttctatgatgatatgggatcgatctggtttgtgaacatggattttgcaacaaaactgaaatctttaggaatcaaatgccgtgtatttaacccgattctgccgggactgaatatgttcctgaacaatcgcgatcaccggaagattactgtgattgatggaaaggttgcctacacaggtggatacaatctggcgaatgagtatttcaacatcacacatccgtatggaatctggaaagataccgggatccgtatggaaggagatgcggtcaagtctatgacagtagcatttctggaaatgtggaatgcagccggaaatgtaaagtcaaaagaacttgtaccggagaaatatgtgatccactatgcatataaagcacaacagcgtggttatgtccagccatatgcagacagtccgctcgatggtgagcaggtaggcgaggaagtatatatcagtatggcgaataaagcagagaaatactgttggtttatcactccatacctgattatcacagacgagatgacacatgcactcacactggcagcaaagcgtggtgttgatgtacgtatcataacaccgggtatcccggacaagaagatggtctacagtgtgacccgttccttctatcataatctggttaagcatggagtccgtatctatgagtggacaccgggattctgtcatgcgaagatgagtgtggcagatgataaaatggcaacctgcggaacgatcaatctcgattaccgcagtctgtaccatcactttgagaatggatgcttcctggcagattgcgacgcagtgctggagatccgggatgatctgatccgcacgatgggagaaagcagagaagtgactgagcagtataaagaaggaagaagtgcgggtttaagactcggacagctgatcttacgtctgtttgcggagctgctctgataatatcgtttgtgggttgaatttgcattggattgattgtataatgaacttgattgttgagaaattaacaataggttttttatgaaatggatggtctgccggtcagaagatactgaacccgacagccggatatgaactttattttatgaaggaggaatcaacgatgattacctggaacaatttggataagcttacttcttatcaggaacttgagaagacagaaagtgtagacctcgcagcagtgatggccggagagaacggagcagagcgtgtgaagaactacagcgttccgatggcagaaggattagcatacaattatgcagcgaagaaagtggatgacacagttctcgcagctcttgagaaactggcagaagaagcacagctgacagagaagttcgaagcactttacaacggagaagttgtgaacacaggagagaagcgtctcgtacttcaccacatgacacgcggacagctcggagatgccgttgaggctgacggtgttgacaagcgtactttctatgtagagcagcagaagaagattgctgaatttgcgaacaaagtacatgcaggtgagatcacaaacggtgccggagagaagtttacaacagttgttcagattggtatcggcggaagtgacctcggtcctcgcgcaatgtaccttgcacttgagaactgggcaaagaagaatgatacattcaagatggaagcaaagttcatcagcaacgttgacccggatgatgcggcagcagttctgaattctgtagatgttgctcactccatcttcgtacttgtatccaagtcaggaacaacacttgagactctgacaaatgagtcctttgtaaaggatgctcttaagaatgcaggacttgacgcatccaagcatatgatcgcagtaacaagtgagacttcaccacttgcaaagagtgatgattaccttgcagccttcttcatggatgactatatcggaggacgtttctcatctacatcagcagttggcggagcagtactttccctcgcattcggaccggaagtatttgcacagttccttgatggagcagcagctgaggataaactgtccctcaataaaaatatcaaagagaacccggagatgctcgatgcattgatcggtgtatatgagagaaatgtactcggatacccaagcacagcagtacttccatactcccaggcactgagccgtttccctgcacatctgcagcagctggatatggagtctaacggaaaatccgtaaaccgctttggtgagccggttgactatgtaacaggaccggttatcttcggagagcctggaacaaacggacagcactccttctatcagctccttcaccagggaacagacattgtgccgcttcagttcgtaggattcaagaacagccagatcggtacagatgttgtgatccaggacagcacaagccagcagaaactctgcgcgaacgtagctgctcagatcgtagcatttgcatgtggtaaagaagacgagaaccgcaacaagaacttcgaaggaggacgtccttcaagcatcattatcggagagcagttaacaccagcatctctcggagcactgcttgctcacttcgagaacaagatcatgttccagggattcctgtggaatgtaaacagcttcgatcaggaaggtgttcagctcggtaaagtccttgcaaaacgcgtacttgcacatgagacagacggagccctgagagtattcagtgatcttctgaacatctaatcgaattatataagtaaaaagtataggaatcgtgctgtcggcggagagttctgctgacagcacgatcttttatatattaggaaagtgctttcctaatatataaaaaacgctccgcttaggatgcacactgcggcgtataatgtaagtgtcgcaagcgaccgccgcaggcgcaagaatgtgccgaggcacattctttgttcaagcagggattttgtaaaagagagaggaagcaaatgaaaaagcgaaggatcaaaggaattcagatgattccatatggtcttctggccggagttatgacagaagattcaatagaagagaggcaaagagaagtccgcctgacagagatttcatccgaaggattccgcatccggctttgcaggagagggaaagcagaggagaacatttatccgaaagcattcaagatctgcttctatcagatggatcaggcagagtatcgggagattgaaattcgtcgttttcagatagagtcaggggaacagacagaattctatcaagtctatgatattttcacagttcaggaagattataaagaagcctttcagaagctctgtgtcgaatacagccgatacatttcgctcaagctggaagaggatgatgcacgtctggcacaagaaatgaccggttatcccgcacaggaagaagaggaacatttcaagaatgaaatagaacaaaataaaaagtggtttcagaatgcggagatcttccaaaatctgccggcagaattagcagtagaactggatcatccgaaactatacgaacaatatctgaccagaccgattgaacggttcatgaaagaatactggcagcagcatggaatcaaagatgcgcggatcctgggaagacaaccggaccggttgtatatcggcaaccaattctgtccacatctatttccgaaagaagaacagttctttgcacttcttgagaaagcagataaagaacggatagaagtgaccgtcgctttttcctttattcgggaagacaggcttacacagacagaacaactgttgacacgtctggatcagtggtgtgaacaacaggagacttccggtgcggagaagaaacgacttgaggttgtagtcaatgattggggactggcacatcttgtgaagcggacagaacatctgatcccgtgtcttgggacgctcttaaataagcggaagaaagatccgagaatgtcctacaagatgggagataagacgctgttggaacagaataatctgaatgcaggattttatcgcacctatctggaagaaagctttggaatcagcggttatgagtgggaaagctgcggttatacacaggaaataccgcaaaagatacagaatcatctacacgtgccgttctatcaaacaaatacgtcgagctattgtacactttgcgctgtgctggaacacggtgaacgtggaaaacaaagtgagagacaagaatgtccggcaccgtgtctggaacatagcttcttctatccaaagcatttatatatgaagggaaaatacaacagtctgttcgcattggataaacatctgctggatgaaccggagcagttgaagagagaactcggaataaaatggaaccgccttgtggtcaatctattgtgaaatgtgaaaaacagaaggatgatggaagaatggagacacagaaaaggaaacagaatgaaaaagaaaaagcagagcgaaggatgaaaatcgttgcaggacttggctctatagatgaatatattccatacgtcctggcaggagcagacgaattgttctgcggatatgtgccatataactggacaaaaaaatacggaactgtacttccactgaaccgcagggaagtgctggcttataatgtgcagctcggttctttcagtgaattagagatcctctcagcaatgatcaggaagtacagaaagccggtgcatatcgcgatgaattctctctattatattccggaacaatatgaagagattgcagatattgtgaaacagtgtatgaaaatcggattcgacagcttcatccttgccgatccagcattgattttgtacctgagacagaaaggcatatcctgtaagatccatctcagcggtgaagccggagaaatgaaccgggaggcaattaaagttttccagaaaatgggaatcgacagagtaatctttcacaggaaaaatacagttgcatcgatgcggcagatgatagaagctgtaaatgcagaaaaactggaattcgaggcctttgcattgaacgaattgtgtcagttcacaggagcattctgcaattcccttcactgtgacgagatgggttatctgtgcaggacgacctactggggagatgctgagatggaagagcgtatggaacgagtgagaaaaagaacattggaaatagaagagcaacaagagcaacaatatctctgcgggaagagtggatgtgctctgtgtgcgctgccacagctggaggcagcagggattacccatctgaaactggtaggacgaggaaattatgtggaagatatgatccgggatattcggaatctgaaggctgtgctgggggttctggagggaaatcaaagagaaaaaaaagagacagggagatatatcgatcaattgaataagaaaatctttgatggtcagccgtgtgggaataattgtatttataatccggggcattttctttgaggtgtatggggaaaaaaagagaagttcagaatagaaaaagaagcgtatttcgtggagtagattactctacgaaatacgctttttctttaaattgtttcaaatcttagtataattatcgtgttcagtctactcttttcaaacatttctgtcaatctatatacgttcatttcatgaatttatacaatctcttagcaaaaaaagtcgaaaaataaacactttcgacattttaatctccttttttgaatggatttttatctattcgccgtcaaatttatggtcaattgtcagtcaatttccaatctatccgatcagaaaatttaaaatagttatcttaatttatctaaatcacttcgcgcttttaaaatcacatgtatttaaaaatcaatcataattataaatttcacagcatttatttaccgtcaattttttggtcagacacctgaaaactattgatttccaaggctttccgtaaaaaattcgtagagtaatctactctacgaaattttttgcaaaaagggtgaaggcttatgggaagaagaccagcagatctgtcaggaagaaagttcggtatgttgacagccaagtatgcgacggagaaaagagataaacggggatccgtttattggcattgtgtctgtgattgtggaaatgaagttgacgtgacggcagcaggtcttgtgcatggtaattatcatagctgcggttgtttacaaaagaagaaccgtcaggaaattgcgcagagacgacatctcgtagatggaacctgtgttgaagtactagaaaaaagaaaaagcagaaaagataacatgagtggtttccggggcgttttccagttgaagaattctaatcggtatcgtgtggatatcggattcaagggaaagcgctattatgttggtctttttgataattatgacgaagcggtgcaagcaagacttgcagcggagaacctgatccacaatggtttcattcagaaatggaaggaatggaatgagaaggagaaggaagatccggagtgggggaaggagcatccgcttgtgtttgatgtgaagaaagaggatggggagattcgggtgagtgtgtgtgatgagtagtaaaaagatggcgattgctatgtttggacaaaaacgattaagcagagaaggcggaatagaaattgttgtcaaagagctttgcacaagaatggcaaagaatggttatacagttacttgttataacagatcaggacatcatgtgagtggtgcagaatatgataagaaaactgaatacgaaggaattaatcagaaatgcgttccaaccatcgaaaagaaaggtcttgcagctgttagctcatcattctttgcggcactttatagtgcatttgggaaatataatgtcgtacacattcatgccgaaggaccagcctttttttcatggttgccgaagttgttagggaaaagagtaatagtgacggttcatggtttggactggcaacgtgaaaaatggaaatcaggtttcggatctaagtttatcaaacagggcgagaaaaatgctgtgaaatatgctgatgaaatcatcgttttgagcaaaggcgtacatgattactttagaaatcagtatggaagagagacaagatttatcccaaacggtgtgaatcgaccggaaattagaaaagcagaattgattactgataaatttggattgacaaaagattcttacatattatttcttggacgattagtaccggaaaaaggtattcgatatttggttgaggctttcaagaacgttaagacagaaaagaaacttatcatcgccggtggatcaagtgatacagattcttttatgaaagagctaaaagaattggcgaaagatgataaaagaattatcttcacgggatttgttcaaggtcagatgttggaagaactatacagtaatgcttatatttatacactcccttctgatttagaaggaatgcctttgagcctcttggaagcaatgagctatggaaattgttgcttggtttctgacattcaagagtgtacagaggttgtggaagataaagctctgatatttaaaaagtcgaatgtacaagatttacagaataaattacaagaagcttgtgatcgtactgaaaaagtaatggagctaaaacaacaggcggcagattatatttgcaaaaaatataattgggatgatgttgtggaagaaacactgaaattgtacaggagaaaatgaaagtaaggaagttaagatatgcggattttacttgtaaataaatttatatttccaaaaggtggagcggaaacgtacacattcgatgtaggaaaaatgttagaagaacacgggcacgaagtccagtacttcgggcttgagaatgaaaaaaatacagtaggaaatcgagtgggctcatatgtgacgaatatggatttttctcaagggataaaggcaaatttaaatgcgccttttcgtattatctactcaagagaagcgcgcaaaaaaattcgtgcggttttagatgattttcagccggatgtagtccatctcaataatatacagtatcatttgaccccttctattattttggaaattaacaaatggcgtaaagaaacaaaaaaagaatgtaagattgtttacacgacacatgattaccaacttgtttgtcccagccatggaatgtttgatgtgaacatgaagccatgtgaacgatgcttagatggtcattatattcattgtcttcaaactaaatgcttgaaaaattccagagcaaaaagtcttcttggaacactggatggatatatgtggaaatatagtaaagcatactcatatgtggatgcctatatttgctgtagttattttcttaaatcaaagctggacacgcagaaaagattccgtgataaaaccatcgggttgcataatttcaaaaaagagatgccgcacttggataacattcaaaaaaagggttatgtattagagtttgggcatctgtcgcgagacaagggaacagatactttgcttgaagtagccaagaagatgccaaatacagaatttgtgtttattggctatggcccatcagttgataaaatgaaggatattcccaatgtgaagtatctgggatttaagactggagaagaactctatcgcattattgctgaggcagcaatcagtgtctgcccgtctgaatggtatgaaaactgcccgtactctgttatggagtcggtacttttgggtacgcctgttgttgggtctaaaatgggaggtatccccgaattaattgagcctggtaaaaccggagaattgtttgaagcgggtaatgtggaagaactgatgaaggcgataaagaaagttcttcaaacacaagatgtattggaaagatatacaaagaattgtagtcaggtgaattatgaaacgacagagagctactatgtaaaactgatgaaaatttatcgaggagaaaagaatgtggaacaaatttcttcgtaacccacttcatattgtcaaagattatgagctgagaaaactgctttggcaatcggggggtggcacagcggtttgtaaaaaatatctgaagttcagagatatcgctcctgaaaagctgacgttcccagaaacccaagtagatgaacctatttggttattctggaatacagggttggagcaggcacctgagatagtaaggacgtgctatcaatctgtaaaaaaatatgccggcagacaagttgttttgcttacagaaaacaatgtgcagaactatataaatatgccggattatctgaatgagaaattaaaaagcggagtccttccattagcgatttatacagatttgatgcgtgtagcattattggaacattatggtgggacatggatggatgcaacaatactgctaacagatgaaatcccacaggaaatattaaatagtgatttttttgtgtttcacaattcactcggtgaaattgataatcccgtattgtatccggtctggttcatccacgccaagcaacataatagaacgatttgtgagattcgtaatgtcctatttgcttactggaaacgaaataatcatgtaccagaatatctgttttccaatattgtaatcacacaaataatgaggttatcaccagaggttgagagaaagatgccttatttgaatagtgactacagcgaatatctggttagagtattaggagataaatttacagaggaaaaatttaattggattaagcggcttactgggatacataaactaacctataaattagaaccatctattgataaggaggaaacagtttaccattatctggtgcggaatctatgagccttttgaatagtagtttctgcaagataaagggagacaattaaattaattattatgctgaatgactactatcaaaatattggcatgaaaggctttattcaaagatatggaattgttaatgccgtcaaacgaggggcatttatgtttatcaaattgcatcttgtcaaggattatgaggtgcggaaggtattatggcaggaacgagcttcttccaagataaaactatatttaaagtataaggacacagatgttcaggggcttagttttcccgaaaatgatgtagagaatccgatttggatttattggaacaaaggtattgaacaggcaccgatcattattcaaaagtgctatgaatctgtatgtaaacattcaaatcaaaaaatcattttgctgaatgaccaaaatcttgcagattacattcgattgccagattacattgaaaagaaaaaggacgctggccagattccgatggctggatatgcggatctgatgagatttgcattactggaacattatggtggaacgtggatcgattcaactgtgtaccttacagaaccacttccagatacgatcctaaacagtgattttttcgctgtgcgtaattcattgttgctgattgacaatcctgtgctgtatccggcttggttcctacatgcaaaaaagggaaataagactattcgagaagtaagaaatgttgctttctcatattggctcaaaaacgaacatgtaattgagtatctgctaccaaatttgattataacattggtggtgaagagtaatccggaagttgagaaagcaattccctatatgaacagtgattatagcgagtatcttgttaaggttttagctgatgattattcagaagagaaatggaattggatcaaaaaacttacaggtattcataagttgacatataaattagatgctgatattaaacacggacataacttttatgattatttaattacatcaagtgacgagaagaatacaaaataattatttgataccagaatcaaattaaaaagaagaatatgatgacattaaaagaaactagaatttgtgatagtgtatggggaatgatgaatgagaccaaaaattagtgtaattgtaccaatatataatgcggaactttatctggagcaatgtattgagtccgtattgaatcaaacgttgcgagatattgaactattattaatcgatgatggttcaacagataattcttttctgatatgtgaaaaatataaaaaaagagataataggattcaattatatactaataaaaatgtggggcaaggcttagaaagaaattttggtataaaaaaatctacaggtgaatatattgcattcttagattcggatgatcagtataaggagaatatgcttgaaaaactgtatcaaagagcgattgaaacaaatgcagatatggtttcttgtagaatagttgatatgcatgatggaaagatcataaaggaacatccactaaatgataaaattttaattggctgcaaagaaattaaggctgcaatggctgatatgatttcttacgaagagaaagatggatactctggatgtattgcggtatgggatagcattttcaaaagagatataattgaaaatgagggtatacaatttttttccgaacgagatgtttattctgaagatttgttatttaagctgatgtttatgacacatgctaaaaaaatagccttttgcactgaagctgtatatttataccgtgttaatgacacttcgtttacgcatcgaattgatgtatccgtcttaaaaagaattgtaaatttatataatgaagtttgcatactgtttggagatgttttgaaagactataatttgaaacgaagaataattaatcggactttttttaccttgagattcaatataaataagatttctaaaacgagagatgctaaagacttttatagaatacttttgaatgatcaggagataatgcgtgttattgacttatatcagccgacaaatttgaaaaatattgttgtatattattcgcttaaatggaaattgatacgagtttttgagatactatctaaaataaattgatttatagagggatatttatgagaataggaattattacgtttcacagagcaattaattatggggcagttttgcaaacatatgcattacagaaatttttaaatgtttctaactatgatgcagaggttatagattatcgatgtgaacatatggaaaatttttataaaacattcacaataaaggacaagtctgtaaaacagattattagaggaatgttgaattttaaaaacacatataagaaaaaaagagaattttacagatttttggatcaaaatgtccgaataagtacagaagtttatgataagtttaatatagataaggcgaatcttcgctacgataagtttataacaggaagcgatcaggttttcaattttgcatgtacagatttcgataaaacatattttttacaatttgtaaaaaattgtgataacaaactttcctatgctgcttcgtttggtatgaaggagattccagacagctatgtaaatgattataaaagtttgctatcaactttttctgaattatctatccgtgaaaatgcaggacaacagattgtaaaaaaactaaccggaaaagattcggaattatctgtggatccagtctttttattgaccgcagaagaatgggaaaaacttgcaaagaaacctaaacttaagaattatatattaatttacaaattgaatacatcgaatttgatttttgactttgcaagaaaattatctaaattaacgggcagaaaaattgtggcgttgaattttgatgtagtagatcaaatgaaaactccggatataaaaggagtgtattcggcatcagtagaagagtttttgggatatataaaatatgctgactatgttgtgactaattcattccatggaacagccttctctgttatttttcataaagatttttatgtggaagcattacaaaaagattttaagcctaatgatagagtcgaatctttgttatgtttaacagggttagatggatgtaaggtgaaaacattagaggattgtagattaaatgttagtagagattttaattttgctgatgatcagatcagaaaacaatatataaaaacaaatcagtattttgagagggttttgaatgaagatggaaggtcattctaatttaactggtactaaaacattagaaataataattgctttacttattaatctggttattttttctaccaataacaagttgatgatgtacacaaaacacctatcgctcttcataatcgttttgtgttttgtgttgttcgtttcaaaaaaagattatacagtaaaaatgaataagtttataggtctatatgttgcatttgtttcaattctacttgtcggttgcatttggttttctagctctgatggatctatagattatagtatatactttgtttcgggcataagtattgtcctttttaggttttcagaaatattttatcgctatttattgaaaatcttcagggcgctattttggatatttattttttctatgtttttagaagcggcatcgccggatatttttcatagattgtttagatttgcgtcattcggagatgaaactatgcgtgcgcttacatcaggcggagcaatcgcaggtctcgcttttgaaaaggcatatgcggcatttatctgcaatctaggactagggatgatttttgcagaatatatctgtcataaatcatataaatatattattcagagtcttattgtaatggtagctctaatgatgacgggaaaaaggacgctttttattataccaatagcagttttgctgatttatgttatacttttttctaaaaacaataaatttataaaattggcaggtgttggtttaggaattactatatttattataggtgcatatgtactagttcctagtgcgtctttaatcatcgatcgcattgtgaataatgaaggagacgtactttcgggtagagaagtgttttggaattatgcaatggaaatgtttcggcaaaacccattgtttggaaaagggtttttatcgtttaatgattatgctttttatcgaggatttcgatattatggagaacgttggaattatcaggcacataatgtatatattcagcttttggcagaaactggaatcgttggttttctattaatgacattacttattatcttgatgctgttcaagataatatctgtagttaaagaaaagcctgttttttggaatatacttttgatttattggattattttgtttggagtctatagttttactggaaatacattatattatccatgccagctaattgttttgattattattattctgttggtttcaaatataaaagtagcggattcttcttatatggtcagtaaaagaactattaaatggaagttttagatttgagtggaggtgttaaagtggaaccgttagtgagtattattactccatcatataattctgaaaaatatttagatgcattttttatctcaattttggaacaggattatgaaaaatatgaaataatttttattaatgatggctcaactgatagaactgaaaatattgtctataagtataaggagaaatttgaagaaagaaacattcgttttgtgtatttaaagcaggagaatggtggacaagcaaaggctatgaatttgggctttccatatattcaaggaaaatactttatttggccagattcagatgacgaattgtatcgaaacaatattagcgaaaaggtgaaatacatggaacaacacccagatattccattggcaatgtctggggctgattatgtagatgagagtggaaatgtaataaagcgtttacaaagaattaaacctgaaaaagataatttttttgaagatttattattcagtaaaaatgttgtattttgtccgggaatttatatcatgagaacagatatattttttaagtatgtgccaagtagacatataaatgagagccgaattgggcagaattatcagattttattgccagttgcatatcacgaaaaaaaaattggatacattgataaaacgttatataagtatattctacataaaaacagtcattctaatcaagataataataattatgaaaaaacaatccgaagatttcaagaacatgaaaatacattatatgatcttgtaaagaatatatgtgacttcaatgatcagaatatatacactcgaaaagtatttgtacactttaatcgtttttatcttcgattggcaaatgaatacagaatgaaaagtgaagtaaaaatttattataacaaattaaaagtagttggggaaaacggaattaaacaaaaaatatactatattatgggaatgttaggaataaaggcaaggtaaaatatgggacgctcaaaaaaatttatgttgaattcggttacgacagcattattacaggttgtaacaatgattgcagggtttataactcctagatttatgttgacagcatatggatctgaaattaatggcttgatatcatctattctacagtttattagttacttcaatctagtagaggctggtttgtcaagtgcagctgtttattctttgtacaaacctatcgcagagaaagactacaataggattaaccggatagtagttgctgcgaagcacttttatgtgaaatcaggattcatttttgtaggtttggttgtaatcttggctatatgttatccttttattacagattcaactgttttagatcaaactagtattttcgttttagttcttgtgttgggagttaatggctcgttagaattttttactttggcaaaatacagagcattgcttactgctgatcaaaggacatatgtaatttcattggcttcgattgtgtatacagttttaaatactatcattgtcgtggccttatcaataatgcatattaatattgtcttgttgagaattattgcattgttatcaatacttgtgagaacattaatattgtatgtgtatgttaaaactaattaccactttatatgttatgacgtggaacctgattatggtgcgatggataagagatggagtgcgttatatttacagatagttcaaactgtacaaaatgcatctccagcagttatgacaaccattttttcatctcttaaaatggtaagtgtttattcagtttataatatggtgatgtctgggattaatggagtaatgtctgtattttctacgggtgtctcagcaggttttggggaattaattgttaagaaagataagacagcatttcaaaaggcatatagtgatttcgaatatctttattattttatggttagcgttatatattctattacattagttacaatcctaccgtttgtaggggtctatacaagtggagttgatgatattcaatatacaaatcttacacttgctattttatttgtagctaatggaatcttatacaatctaaaaacacctcaaggaatgttagtgatagcggcggggttatataaggaaacaagagttcaaagtacggttcaagcagctattttattgataggaggtatttgctttggaataaaatggggattagctggaatcatgttagcttcctgcttatctaatttatatcgttgtattgatttgtacttttttatacccaaaatggtaacacatatgactagaaaaagtactttgttaaatatttgtactgcaattttaatgattatagtaatatatgttacggcaccaatgctaataaagtttacgccaacaagtcttattacatggtttgtttacgcaatctgtgttggaatttatagtttagtttttatttgtatttttcatattatatttgcaagagacaattttagaacgatacttataagattgagaaatatgaaaggaaaataagatggaaaagttatatataaataaagaggactgttgtggatgttcagcatgtttgaatatttgtcctaaacatgcaatttatatgaaacatgatgaaaagggatatttgtatcctgaaattagaaaagattcatgcgttaattgcggattatgcgaaaaggtttgtccattaaaagataaagaaaagaataaaaagtttgaaaaaatagcttatggagtaaaaaataaagatgagcatgaacgagcaaaaagtagttcaggtggagtatttgtagaagttgcaaaatatattttgaacaatgatggcgttgtgtatggtgtggagatgaacaatgattttcaagtaaaacatggaagagcgacaacgcttgaagatgctcggaaatttcaaggctctaaatatgtacaaagtgataaacattcgattttttgtatggtacagaaagatctgaaggaaggaaaagaggtgttgtttacaggtacgccatgtgaggtagctggtttgaagaaatatttgagaaaagaatatgataatttatatacgttggatttaatttgtcatggtgtaccaagtagtgaattattaaacgcatttttaaagggaaaagaaaagctgtattcctctcaaataacagaactaaaatttcgagagaaagcgtatggttggagaaatcaagaattatatattaaatttgaaaatggacgaatataccatgctcctatatgggtagataatttttatcgtttatttaccaataattatatattaagagattcttgttattcatgtaaattctcaagcatggaacgacagggagacataacaattggagacttttggaatatcaaaaatgcaaatgagacatttgaagataaattgggtgtatcatctgttatcataaattccgaaaagggaaagaaaatatttgaaacagtaaaaaatgaatttgatataatcgaatgttcgttaaatgatattaatcagaaaaatttaaatagtccctcacctaaaccagttcactatgaagaatttcaaaggctgattgctgaaaaaggattcgagtattgtttaaaaaaatacggatcaatgaagatgcttgaaaaaattagaagagctttgtcccctgtaaaacaaaggctaaaaatcatgataaggcattaaaacttaacttctgagaaaaagtgaaaaatataattttagttgcttgttttaagatatggttttctatattgatatattgcagatatgtggcgttctgaatctgaacagtggaaatatgggaatcataattattttgcaatagttttaataatgaagaatagttatataatattcacgctaaaataatttcaaagaatatgagaagattgtaataaagaagtacactgagagaataactggcagatggaacctggtaggacttaagcattaaggattaaagtggcatggggaaaagaatgtatttagcaacgataataaatgaggaggaaaggcaatgaaaacaacattacttatcatggctgctggtatcggtagccgcttcggaatgggaattaaggctgacttgttcagtgatctgtaaacgacgatgaaagaaatgattgatttactcggaaagatcatcacaaacattctgactgctctctatgagccatttggattttcactcctgctttccttccttgccatgtttttctatctttatgcttatgagccaatacatgctggcaaaggctggaagaatgccatagtgacctggtatcagaagttcaaagagagcgtgttcttccggaggttgtttttcttatcttttgtgacctcacttattctgttccgaaccctgttaaaccgtcagctatggatgaatcctttatccgatgttatgggcggctggggcatctgggagacagtgaacggtgaacagaagctgaccaccgagtgcatcgagaacgtaatcatgatggtgccgttttcagcagtagtgatgtggacgttcggaaagaagataggaaacagttggaagaagatactgtggtatagcgggaagatagcatttatcttttcgataagcattgagatgctacaattattgcttcgcttgggaacgtttcagctatcagacatcttctataacacagtcggtggagtgattggcggattgatgtattgtgcggtgataaaggcaagaaagtatctgtaaaactggatgaaattgtgatatactgggagcgatagctccctacgctgctctgataatcacacacctcttcgtggtgggcagcaggcaacgatctatgatcggctgagatgtgagacttgttatacaaaataatctgagattggatctgcgcgacatgaatagagtaacgattacgtgttcaaatggaccggttgaactaagcgagtttgtagaagatttgtattcagtatcagaaaaagcaaatagggcattaaaagagctcagaataggtttgccaacgtggactgcaaaagaaacctataataaaatgaaaatctcattgtggatatatgataacatagaagttaatgctttttgtcattatgaaaatggacaaaattatattgcattgtcagtagggctattaacgatgctgtggaaagaggcagaagaatttgttgatcaaaataatttggtttcggtcttcaaaatttttgaaggaaataaagattattttaaggatatgttgtttttcttcatggttaactttaccattgcccatgaatatggacatatcgcacacggacatcttaaagatcgtgcatgtgaaaatagtattgatgaaagattttctgtaatggaaaacattagcgatggggagaagagaacaagaaattggaatatacaactgagagaatatgatgcagattcttttgcagctacagtacagtctatgcttttcttacagcaatggcaagatgatattaaagcaaatatcgcaaattttgatataatgttcatttcaaattacctttgttttcgcacatttgctgaaaatacggggagagatttttcaaattatatgacgaaaaatatcgatgaatatgatcatccgcatcccggtataagaatgtattattcgattatactttactcttattggctcatcaaactttacggagagaatgagaaagtattaacgattcttgaaagtggtagtcatgcagttgtggcatatgagaagcaagtgttagaaacaaatgaacttagagaatgttattattcagttgcgtatacagcaaaaggcgtccagcatttgatgaatctacataatggatggcaagaagtggttgattactataatcaatacgcatacattccaatagagaaaatggaacgtattgatggtttgcttgtatcattagatgaaagtggttcatttattagacagtgacatacccaacacagtgctatacttaaatcactataaaaggaaagagattatcacctatgcctagagcaaaaggcaacaaaaaccgtcccaagcacgccactaattcagcccccaagactgattttacattccagattgcagaaaagcaggaaactattgcggctctgaatactgagattgcatccatcaccgccaacattgacactttgaaagctgatctgaaagagaagaagcaaagaagatgagatagaggctgttttgaaaaaaagctgttgtcaagcggcatgaatgcggatgagattcttgaaaactgaaataagattgaccgtgtggacaaactaaactccagaagttcacacggtcttttttgaagaccaccatatagtttatgatggaaagaaaagaaatggagcgtgagaaaaatgaatttatcaaaaatacatcatattggattgcatgaaaggtgtcaggcaccattaaatttttataaacgaacaaattcgtatttgcaaatcctatatagagtgtaattaattgaagaattgaatagaagctaggaattataatggcattaactttagcatataagtaaacgctcaatagcgggtacattgaaaaattgagaaccgccgtaattggcggttcctggttactgttgttttcggatcccttttggaagtttttttgaccatggtaacaggtcttcaagaaaggttcgatctttttgttccaaaaagaaccagaaggtgactaacaccattaaaattttatgctgacttgaaaaaataaattccagtgtagagcggagggatttagaaacttattttagggtgagaaagaaaattgaaaatatgtgaaacaaaatgttcggaatatgttataatatttttaatatattatttattataatataatcgaagtggaggaagcgctatgctaatacaaggaacatcaattactgttaattataaaaaaattgaaggaattaaaaaggtatattacaataatgaagatattttaaaagacttttttaacgaagctgcagttttgccagttccggatgacgcacctgcggagatacctagaatcataattaaaacattaaatgaacatgcacaattaaatatttcaccgatcgcgactacatttgaagttcattatgatgctggatttgaaaaagaatgggatgcatgcgcaaagtatttagtggaaagaatgtcaaaagtgtttgaatttttgaaccttttaacggaaaacacatatgagtatgttggattggtttctactatattgtatgatgaagtcaaagagaaaggtgcagagaggctttcgcgtaatcttttgaattctcaaaagattggcaatatttacgatattaatataaagtatacttttgttgaaaacgaaaatgtttttgtaaatattatgttacaaaatgcaagattatttaaaccggaagcagatggtaataaagcgggtgcgttgggaattaatgagcaaattgcagagtcaataggtgcaattgttgatattaatgatagatatggatttaatacaaatgttgattataaatcgaatagtagtatgttaaataatttaattgagtctatgggaaatgtaattaacaataaactaacgacattgattgagaaaggagaatattaacatggaacaaaatagatttataaaaaatatttctggaacagtttgtgttataggacttgctttatcaacaatgaatacaaatagtacaatggttgttaatatgaattatcaaattccaagtgcgcattatagagattatgatgaaaattcttcgaatctatacaatactgctgtggtaaggaatagtaatatttattataaacagaaagctaaaaccagattagaaaatgaggcaatagaattatttggaacaatgagagatgcaacatcagaagaacgagaaagtgtaaataaatatattaggaatatttcaaaagatacaggggtgaatttcttcgatttatgttaaaggaattaattgattttgtagatagtattttgccttctgtgccaatgggaacaaaagaaggagtgcaagaagcaattgcacagtttgaaaaggatggagagcagataaaatatttgacagcaaatcctttgtctgagctttcacagggggatattatttcagcagtcccattttactattttgacaatgatggaaaccaaaagatgtttaaaactgatgcattagttttatctacatcatgtcatatagatcaaaaagataaattggttcttgtgccagtatttcctttgacgtcatttaagggaaattttgttgaattaaagaaaaacaaagtgattgattatatgtatattccagaagggattttaataaatagttacgtaaattttgaaataatgaacacctttagtaaagagctgattatgtctggattaaaaaatggaaaacttactagagtggcatcattgaatcagataggatactatttttttattataaagttgacagtatatttaatgcgaagagaagatataggaacgttaaatgagagaaatattggatttgcatagtggaacgtaggtaagtaggtaatcatccgtattaccaaagtgtgaagcggcgaattgtcagcggtggaaactgcacgatagaatcggcagtttttccttcctgacagcgtagcttatctaaaaaaagcattttctgagcggaagaacagcacaatctcgtagctttatcttatgggagcatactgctcttataagatatggtgtaaaaggcaatgttattggatattcttgtctcaagaaacccagattccggtaatatggaaaccggtattccggagcggaaaccaccattgattggcttgattaatactcataaggaatcgaacgaatgtcaagcccagagccgatttgcgagacataatccggcgttacatttgtgagatttcttgtattcttcataattgtcaatcggtttccttatcaccggactgcatggacaccgagactggaatattcagttattaagttaattgttcgataaagtgtttggtagataataaatgtcaaaatctgaaaatggatatagaaaattaagagaaaatcagtaaaaaaggacatgccaaaaaggcagagaagaaatctgtcaaaagataatatttgattaaaagaaactatcgatatccaaaatgaatagcaccaattccgcgtaaaggacgtgaaaattgtcggaattcacttttggcaacatgaataagttgaccacattgtagtctgaacccatttaaaaaagtattaacacatgaaactatattgactagacatatcatagatgatattatggtaaaaagtttgatggggtgaagtggcatggataatacagtggagatttatgaagcggagaaagaattaagagaaaagcgtctggcagtgtatgcagaagcaattcaggaaaaggtacagaaggactcggaacaggtgattaaagaactggtagaagaaagataccgtcagaaaaagacgcagcaggagatggcagatataacaggagtaagagcatctaatattgccagatttgagagggcaggctgcaccccaacattgattatgttggagaagtatgcgaatgcattaggaaagcatatagagataagaatatgtgaagataaatagtagcgagatttcacgctactatcttccataacaatcacaaatgatagtatgacaaaagaaaatataagaaggtatgttaataaaagagagtatataaagtacattaaaatattatagaagagcttgattctacaatgcctcctcagttataatgaaatcaagaagtagtgattatactgaaactgaaagcaaaaggcttccagcattagaaaattttattgcaaaagattataatggacgaataaaaccttatataatatgggataatgaaaaccaaataatagttggatattttacgttaattacaacgtgtatgatcgttaagatgaatgaagaaacggatcctgaacatatccaggaaaaagatgtcgaaaaaataattccctatgtggaattggaacattttgcatgcatttaatgattcaaaagtaatagattcgtataaaagaatgggatttgaaacgatagaggacgatgcagaatctatagttccggtattatctaacgtaaaagcacttcattcggaatatgttggtaattgtaaatttatgtttaaagatgttgaaacaatattacgtgaggtagagaggagtgattagtatgtataataattctcaaagcccaattatggtggtatcaggaaaaaaggcaaaagaaatattgaaaaaagcggaaacacctattgcaaaccatacgagagcagtaaataaggcgagagaaagattaagaaagttgggaacaattaaataacagacaaatcaaaagcgggaaaattcccgctttaactatatgaatatgttttgttttgagagtctgattccattaaaaaaatgtgcagatgatgacacgatgatgattcctaacgacgcttttctgaaatactttccagatgcagttttatcaggtatgaaaatctatagtgatgcgtcagtaagtgatttctttaagagcatcactaaggataagagtacaggctttctaaatgaatggaatgcaaaaaggaatcgaagggaacgtatttatatttcctatgattctacgaataagaactgccaggccggggagattgaactggctgaattcggtcatgtcaagacagatatcggttcagctatcatcaactattcagttggatatgatcttaagaataaagaaccactcttttacgaagcctatcctggaagtattaatgacgtatcacagcttagagccatgcttggtaaaatcacttggtatggttataaaaaaatcggtttcattagactttatttgaaggtgatgaaaaaagagatacattcatatttatcacagtatctcaaaagatgctgataaacgggaaatatcattatgcgggtactttgttattattacatccgaaaggatgaccgcaaaggaagcactgcatctttataagagccgtgatgtatctgagaaactttttgtttctgataaatcattccttggaaacaagagcatgcgttcacatacaaacgaaggcgttgaaggacgaattttcacacaattcatcgcattgataattcgaaacaaaatttatactgcattacaggaagagaatgaaaagcttgagaagaaatagaattatatgacagttccggaagcaatcaaggaacttgagaagattgaaatgacacgacagacgaataaagtataccggctgaaccatgctgtgacagcaaagcagaaaaaaatcttaaaagcgtttgggatgaatgaaggaaacattacttatcgagccagagagatcatgcaatatttgcaaagtaaatctgaagaggagtgatcacatgttattagaacactatcttgcggttagatatggagacattattgtttttctttatcatgaagacatgcagtcagttgttgatttattattcaataatagtcagagagaaaagttattgaaaagatttttagaatactgatatatgatagacgtgaaagttgcattcgaaggtttgaaagtggtgagaaactataaatactatacgttattgacacttttttggttaattgatgcggtaatattaataatagatgaagcttatataagtgataaaagggagatgagagaaggtgctgattgatataaaaaagaaatttgcatctttgggaaataactgggaagcatatatacaatttcttgaaataaagagttttgtagaagctagtaattgtcttagagagatggaaataagcatattaagtattttaacgtgtattgatcaagcatgtactgctgaaaaagaagctttgttttcacatgtaactattgagccaagaataattgaggctatagaaaatgacattgaactactttatttaattcagggagttcaagatagagatgatatgatagatgaaatgttcccatgggatgaattgtcagatgatgattatccatcagatgttatggctctgatttttgatgcaatagacattaggaaacagatagatgttcttggtgttacaatatcaacatttttggtgtttttagatgaaaaagcaacagtacaagaaaagaaatttgcaaaagcaatgctcaaaatatatagacaattattatattttgggaaaattgaaaaaatatattttcagataggaaatctaaaaaatgaagcatcaaaacgtaatagtaatgatcatacaacgagggttgagatgattttttctcttcataatcaagataaatatattttgagagtggatatgcctcataaagggcaggctatgatacacataaatcttaatgaaagtatatttgatggaaatgttgcaaaacttgtatctacagcattcccatttcccgatgatagcataattattgaacaactctcttttttaggagatgatatgctaaaattattttataggcaagagaatatattttggtttcgtattgaatttaaaaagaaagtcgaagaatttattcaagagaagtcgaaaaaagattttttatgtaagttgtatgatgaaagatgtcattattttgagttatgggaagaagataatcttcaagaggaaatggttctttctttttttgataaacaatgtactgtgctaagagaattaaatttgaataattttaatgaattgtattttgtgaaatctgatcagaaaattgttgaggcactaggaaaacttcgatgggtagatcattttgtccatataatagtagaagaattatatagagaaaaggaatttaaaaatataagccatatgagtataagagagttgttatggcttatttttgatacggcgaaagatcatgatataatgtggcagggaagagagcttacaaaggaaatatttatacaagaagatttattaaaaatttgtaattggattatggaaatataaataaagacgaataataatgtgagcaggtacaacacagactctttttgatgaacttttggaataacctttaatgcttcatcaaatctgtgttaaataaaaggtgtcaggcactaatgtggtcaacccagtgtcaacttaagacaagtgcttggccagagcaagggccaatggtgtgaaatcgggaaaagaggaaagtagattagaaaaaaagacgcactttaatagagcttcacggaaaagccatgttaaaaactattgattattagaatgcgacttttttgttgttaaaatgtgttctgcctattgctttgtttttttcgtcgtagaccacattgtggtctgaccctattaaattatcataaacaaataaattcgtatttacaaatcatatataaagtgatagacttatgaaaataagaaaagcaattaactgtccagtacctgctatatatgtaggtactggtaagaaaaaagaggcggaaaagaaggaatgaaaacaatcagtgataagatttttgaattattaaaagaaaagggaatgagccagaaagaatttgcccagagaacaggaattgcagagagttcaataagtgactggaagaaaaaaagaacaaatccggtaagtgataagattttgatcatttgcgaagtgttggatgtgacaccatatgagctgttatcaggagcagagcatacaggaaacagaagcagggataataatacttatgtgattagtaaagagacagaaattggaatgctggtagaaacatatcaaaaattagatacaaatgcacagaaaaggttgatcggatatttggaagcgctaaaagagctttcataaaaatttaccaattaaatccgtataaacgaataaatagtgaaataagatgtaaaaacggaggactacctatatctggaaaccaggtaacaattgatagttagtcttattgtttaaagtggatgggaagtgtaagattttagtcgtgtgagattcacataaaaatctagataataattaggaaggaaatggcttgattatattacatataagtaatataattaacaaatcagaatatttatatgaataagaaacaggtattagcggaactggttaaaaatttggaagaatgttcggaaaggggatatgtttttcatcctaagtttatgtatgagtttcaagtactgcttaaaaatgctacgggtaatgaaaaagaaattttcacattattagtaaaacaattaaattttttaaaggaactgggaacaaatgtatgtaaagcagatagtaatgaaataataaagaatcaagatagagattattattcattgcatttatcgggaaaaaattttaactttagattattgatggcatttgacgaaaaagatacacctaaatttttagtagcattctatgagcgtgcaggaaagaaaaaaacagattatactcaatataagaaggttttggacagtagatttgaggaagtctagaaaagggagaatttatagtatggagaaaaaaaataaggaaaatagcacttcattagaggatttattagctatgtttgaggataatatttcaattgctgatattaatgcatcgagatatttgggtaagatttcagcatctattgttaagcgtagaatggaattgaaaatgtcgcagaaagaatttgcaggatatcttggagttagtcagggaatggtatcaagatgggaaggtggagattataatttctcaattaaggcactttcagaaattgcagagaaattagagttagaattatgtattaatttgaaacctccagttaagaaatcaaaggaatgctatatagagcagaagaaggaatatatatttgctagggatgatgataaaaaatttagtaaaagtaatattcttcaatttaattctaaaagaaatcatctagataataatacaataaagataataaataattttgagttgcaagaaatgtaaagagaggtaaataagatgttacaatatgtaaacggattttcatgtgctatggattctgaaaaagatgagttgataattaaattgttacaacgtagtcctgattttacggatgataatgatggtgtaataatggatgaagtggcaacaattgttatgggaaaggtgacagcacaacgtttattggaaggattaaaagaaatgctagaagatgaggtcgtttaatagttactatttattaagaaacatgactccaaggctgaccacattgtggtctgacctcattatattttcatccctagatatccgtataaacgaagaaaataagtaacaaaagagtacgaagtaaaagtgaatgcatattgctgcgggatgagtgaaaattagatatgatcttagaaagaaatttgaacagattgattacctacttacattgcattccatgatacgaagacaggaatacataacattggtgtcaggcacttaaattattacgaaatattgtggacgaacttttgctggcattggcattgagagaagatgcggatgaacggcatgtgacaaggagcgtgagaaaaatgaatttatcaaaaatacatcatgttgcaatcattgtatctgactacgaagccgctaaggatttctatgtaaacaagctgggtttctctgtcattagagaaaactatcgcccggagcgcaaggactggaagctggatctgcgtgtcaatgagcaaacagagctggagattttctccgaggcaaatcctccgaagcgtgtaaaccggccggaggcctgtggtctgcgtcatcttgcgttctgcgttgatagcgtggagcagacggtgaatgagttggcggaagtcggtattgaatgtgagctgattcgggttgacgattatacaggaaagaagatgactttcttccatgacccggacggactgccgttggaactgcatgagtaaagaggtgggcaaaatgatattccgtaaattaagcgcagatgaaaagaagaggttagaatacgagacaagacaaagagcgattagagattacaatataggaatgttaaccgcagaaagacgaggaattgagaatggacgtaagattgggatagaagaaggaagagcagaaatcaatcaattaattctagaactgtcaaaacttggacgtacagaagacattacaaaagcggcggctgacaaagaatatcagagaaaactattgaaagagtttggtttacattaaacaatcctactatttaccttacccaacttgtcatttatccagtaagacggtagtatcaaaatacattggagcgcgtgaaattttttgacaagataacttacgactatttacattcttctgaggaaaatctgtggagcttaatgtatttgacgggatatttaacgcaggttagagattataagattgatgatggctggcaagacaacatggtggcattgaaaattccgaatttggaaatcaagcaaattttcgaggctaaacgtgcaaggtcggtagatgaactggaatccgagtgtgagaaagcattgcggcaaattgatgaaagaatgtatgcaagggattttgaggacgagtatgacagtgatcatattcattgctatggcattgcattctataaaaagcgttgcctggtaaagaaaaaataataagataaataaaaaacaggagtcgctgcgtacaacacgggtaacgcaaaccgactcctgtttcctttcatccatttccttcatatcctgatcgaagaaatgaacttcatccggataggtctcgccaggttcttttcgtccttctggtgaatggtactgcatttattgggttcggaattgataatttgagtataccgtatcgtcaaggggatgtccactttattatttttctaaaaatgattggaagagtcagatttatagtgtatgataagaatgcagggttaaactgtcagaatttacaacaggaggtttacatcatggaaaaagcaagggtgtattatactgatttccgggcgaagcttggcgaaggtcttccaacgaagctgaaacgtctgatgaagaaagcaggaatcagtgagattgacatggagaataaatttgtggcgattaagatgcattttggagagatggggaatatcagttatctccgtccgaattatgctaaggcggttgttgatgtcgtgaaggagcttggaggaaagccattccttacagattgtaatacactatatccgggcagtagaaagaacgcactggagcatctttactgtgcatgggagaatggatttacaccgttgagtgtcggatgtccggtgattatcggagacggcctgaagggaacggatgatattgaagttccggtacagggaggagagtacatagagaaagcgaagatcggacgtgccgtgatggatgcggatgtatttatcagtctgacgcattttaaagggcatgagacgacaggtttcggtggtacgatcaagaatatcggaatgggatgtggttccagagccggtaagaaggatcagcattctgttggtaaaccgacgatcgatcaggaagcctgtagaggatgtaagagctgtctgagagagtgtgcgaatgacggcctgatttatgatgctgatgcaagaaagatgtcgattgatcttgaacattgtgttggatgtggaagatgtatcggggcatgtaactttgatgcaatttcatttatggacagtgcggcaaccaaggtattgaactgcaagatggcagagtatacaaaggcggttgtggatggaagaccgaacttccatatttcactgatcgttgacgtatcaccgaactgtgactgtcatccggagaatgatgcaccgatcctgccgaatatcggtatgtttgcctcttttgatccgctggcgctggatcaggcgtgtgcagatgtctgtcttagcgcgacaccgttgccgcacagccagcttgcagatcgtatggaagaagagaatttctgcgatcatcatgatcattttgagaatacaacaccgaattcagagtacaagacttgtctggcacatgcagagaagatcggtcttggaacaagagagtatgaattgatctatatgaaataaatgtcagataaaagacgtattgtagcaaataagctttacaataaaaatgttttaggaggaattgaagatgagtgaattaagagttgagagaaaagaaaacatggctggtggaaagggacacgttatcatcaagcacattctggaagataaggaactgaacggaaagtgcaagatgtatgcagaagtcacactggagccgggatgttctcttggatatcatgagcatcacaacgagagtgagacatattatattcttcgtggggaaggaaattatgatgacaatggacgtatccgcccggtgaaagcaggagatgtgacatttacaccggatggaatgggacacggactgacgaatacaggggatacagatcttgtatttatggcactgatcattttggattaatgcatcgtattttttgagactggcccataaattttaaaagtgcatccggcaatgatttcgtaattgatttcattgccgggtgcactttttgtaaagggaatattgtattctaattggaacttttgtattttctgatcaggcaggagatgactccggctgcacacagtccaaacaatacattgtggagggaaccgtatacatcaagagctcctttcactccgtagatcacttccggtgaatcagggagtaacggactgaagaggaacgcagcataggaaatcgcgaatacaaggataaaagaccacaggcctcttccggtatcttctctccagctggagactccgtcacgtacgcggacgcgtgtcattgaccagagaagggagatgaattcgaagaacaggaagagggcagctacacataagtaagcggccagagtctgggaaatcttctgtgtctggattgcctcctggatatctccgtacggtgtgcttgcacggtaaaagttgtagagtacaaatgctgttgtggccagaattaacacaatagaaagctgctgaagcaatgtgcttgtgagccttgataatgcctttccgccttttttgatcggtgcggcaagttttactccgccaccggaacgtttcctgccggaggagcgtctgtcgtagtcgcgatcattatatgaatcattataaggattgttgcgatttgatcgtttgttaggagtgttataatcatcctcataataatcatcctcgtaatctgcatcatcatcttcataatcatcgtcatattcaggaagtacttcttcgaactggctgtcatcggaatcgttaaagttatctcggtaatcgtctgcgttcataacgattgtctctgtgttagaatcaggtctgtttatttgttctgtatcttcagaagtatgaaaattgatttccggatcttcttcatatgtaacttcaaaatcatcatcgaaaatgtctgagaaatcattcttcgggctcatatcatttacctcactttccatttgaaaccatgtcattgcatgtatctcactatgttataacgttttccgtgttttctcaaccctttcaaatatgaatttaaaaatttttaagattttcagtgtctgaaatatctgttatactggaatggcgatgtgattgataaaaatgcagaaaaacagaaagcagggaaaagaatgaatttaattaatatagaacatatttctaaaatatatggggagaaagtgatttttgatgatgcatcgtttggtgttcagcagggggataagatcgggattgttgggattaacggaaccggaaagtcaactcttttgaaggtggttgcgggagaggaagtgccggatgaggggcaggttgttcgtcagaatggtctgaagattgcttttgttccgcagaatccgacatttccggaggggatggatatccgttcctatgcacttcaggatgcagatgcggagagctggcaggtggaaagtaatctgacggaacttgggatcacgcagtgggatcagaagatcgacactttatccgggggacagaagagacgtgtggttcttgcgaagatacttgcaggagactttgatgtacttcttctggacgagccgacgaatcatctggatcaggagatgatttcctggctggaagattatctgagatcttaccgtggaactgttcttatggtaacacatgaccgctatttccttgatcgtgtgacgaaccgtatcctggagctgagccatggaaagatgtatggatatgatgcggattattccggatttcttgaattgaaggcgcagagggaagagatggagcttgcaagtcagagaaagcgtcagagtattcttcggatggaactggaatgggcgaagcgtggatgccgtgcgagaacgacaaagcagaaggcaagactggaacgtctggaagcgttgaaagcaggaaaagcacctgtgacggatcagacggtggagcttgattctgtagagacgcgaatgggcaagaagacgatcgaacttcatcatgtcagcaagcgttttggggagaagaagattctggatgatttcagttatattgtgcttcgcaatcagcggcttggaattatcggaccgaacggctgtggaaaatcaacaattcttaagatgatcgcaggtgtactcaagccggatgcaggagagattgagatcggtgagacgatcaagatcggatattttgcacaggaagaacagcatatggatgattcccagcgtgtgatcgattacgtgaaagatattgcggagtatgtgacgacaaaggacggacagatcagtgcgagtcaattgttggagagattcttatttacaccggatatgcagtatgcaccaatcggtaagctttccggaggggagaagagaaggctttatcttcttggtgttcttgcggagaatgcgaatgttctgttgtttgacgaggccggaaataatctggatatcccaacacttacgattcttgaggactatctgaattcatttacaggtattgtgatcaccgtatcgcatgacagatatttccttgataatgtagttgaccgtatctttgaactggatggaaacggcggtatccgacagtttgagggaggatacacggattatgtagaggcgaagaaacgcagattcggagaggaaagcaaagctatcacaggaaagtctgaacttaagccggcagaaaagtccacggaagaagagacgcagaagaaaggaaagaactggaaggacgggcagcgccagaaggtgaagttttctttcaaggagcagcgtgaatatgagacaattgatgaggagattgcaaagctggaagaaaaaattgcgtctcttgatcgtcagattgccgcaaatgcaacgaattcagtgaaactgcgtgagctgatggaagagcaggagaaagtaagagagcagctcgaagagaaggaagagcgttggatgtatttgaatgaactggcagaggaatttggtctgtgatgaaaaatctcaaaaagagggttgacaaagccggttctagttgttaatattaagtaagtaaaaaacagaacgcactctgttttatacaaatcatggaaggagcgaaccagtcatcttagtcagtcataatattttcgcttcctgaagtgagaaagagaggatacatatgagaagtcaggtattttcactgctcgtagataacaattcaggtgttttgagcagaatttcaggactcttcagccgtcgtggatacagcattgacagtattacggcaggtatgacagcagatcctagatttacaaggattacaattgtttcatccggtgatgagcagatcctatcacagattgagaagcaacttcgtaagttggaggatgttgtggatatcaaggcgttgaaagcagaagaatccgtttgcagagagttgatcatggtgaagcttcgtgcgaatgccgcacagcgtggggagatcatctcagttgcagatattttcagagcaaagatcgtagatgtggaagaagattgtctgatcattgaattgacaggtacacagaataagctggaagctttcctgaatcttctaaaggattatgagatactcgaactggcaagaaccggaattaccggactttccagaggcagcaaggatgttgcatttttctgatccggtcaggatcggagaaccgcagggagagcttgtggaacagataaagctagtaaagggcaagacctttcactatataggatacccccgaagagatcgggagcattctactctatattttaaatttatttaggaggaatgcaaaatggcagcaaaaatttattatcaggaagattgtaacctttctcttctcgaaggacagaagatcgctatcattggatacggaagccagggacatgcacatgcactgaacttaagagagtcaggatgtgatgttatcatcggtctgtatgagggaagccgttcctggaagaaagcagaagagcagggattcaaagtatatacagcagctgaagctgcaaagcaggctgacatcatcatgattctgatcaacgatgagaaacaggctaaactttacaaagaagacatcgagccaaaccttgaagagggtaacatgcttatgttcgctcacggattcaacatccatttcggaacaatcgtaccgccgaagaatgttgatgttacaatgatcgcacctaaggcaccaggacatacagtaagaagcgagtatcaggctggaaaaggaacaccttgtctggtagctgtagagcaggattacacaggaaaggctcttgacagagcacttgcttatggtcttggaatcggtggagcaagagccggagttcttgagacaacattcagaacagagacagagacagacctcttcggagagcaggctgtactttgtggtggtgtatgtgcacttatgcaggctggattcgagactctttgtgaggctggatatgatccgagaaatgcatactttgagtgtatccatgagatgaagctgatcgttgacctgatttaccagtcaggattcgctggaatgagatattctatctctaacacagctgagtacggtgattatatcacaggacctaagatcgttacagctgagacaaagaaagctatgaagaaaattctttctgatatccaggatggtacatttgcaaaagacttcctgcttgatatgtctgatgcaggtggacaggttcacttcaaggctatgagaaaacttgctgctgagcaccagtcagagaaggttggagctgagatcagaaagctttacagctggagtgatgaggacaaactgatcaacaactaatcagttgtctgagattatagaataagataatagaagaccggtacttttcgagtcgaggcattaagctggcttgagagtaccggtctttttgactgaggcgtcgtgcagcagccaggcatctctaaaatgctacgcattttagagatgtagcgtatccgccacatagttctaagaatacagaatctcgctcatgcgagcatggctcgtatctgtatctttagaactgcctggctctgaacgtataacaaaaggcgcatctgccatgacggtagcagatgcgcctgaaaattctattctctatttataattaagcgatagagtcaacagctttggaaagacgagcgatctttctggaaactgttttcttgtgataaacacccttgcttccagctttggaaatctcaacgattgctgtgtgaagagcagccttagcagcctctacattcttcttagctacagctgtctctactttctttacagctgttttaaccttagatttgattgctttgtttctagcagcttttgtctctgttactaaaattcttttctttgcagatttaatattagccaatgtgtgcacctccaaaatattctatcatatgattttcaaatgtgattcatgtgttcaatagactcggacacggacgttctatcgaaacatactcatttattctagtccaacaaacgtgttctgtcaatacatattttacaaaaaaatgctaaaaataggctgtaataaaacgaatcgtggttacagtatacaagaatctttaacctgacacggagaaaagggaggctatgatgaaaaattacagtgtgcgtacggatcttgcacttgaggagaaggaacgttttgcatctgacaatgtagaagtgcagggagttgttctggaggaagagtatgacgaggagaatgagatccggctgacccgtgtggtgatcgagacggagaatggagcgaagatcatgggaaaaccgacaggcatttatctgacactggaatctccggatctggcattggaggtggaagaaaatagcagggtattacaggaacggatctgtgattgcatccgggaattgattttccataaaatttcctgtgaagatagaaaagaattaaagattctttttgtcgggctcggtaacagagcggtgacaccggatgcgcttggtccttatgttgcagatcatctggaggtaaaccggcatatagtaaaagaatacgggaaatatgcgatgcgtacggagcaattgattgttcttagtgcaattgttcccggcgtgatgggacaaacggggatggaaacggcggagattgtccgtggaattgtccatgagacgaagccggatctgatccttgcagtggatgcacttgctgcgcgaaacagcagacgattgaaccggacgattcagattgccgatacaggaattcatccgggttccggtgttggaaattacaggaatgcaatgacggaagaatctctgggggttcctgtgattggaatcggagtgcctacggttgttgatgcggcaacgatcgtcaatgatacgatggaaaatttcatcactgcactggagcagtcgcaggcattaaggagtacaggagagattttgcgctcttatagtgcggcggaaaaatatgagtttgtaaaagaattgatctccccacatttaaatggaatgtttgtgacaccaaaggatgtggatgaaatggtccatcagatcagtcatacgatagcagcgtccttgaatcttcttttttctgatataaatgcaggagaaagcgaatagaatgatagaaatgagcggaaggactctgcaatgcgtgtgtataagaaaaaaacaatccgacgtatgaaatggtatggggtgattctggttctgtcaggtattccgttaggaattggtatgggccggtcattggaagaggggagaatatttttattagaagaaagtcagatttatgcgcagaaattgtaccttccgcttttttcttatcagaaagaacaggaatcagaaagggaagagatcttcaggcttccacttcatgtgtggatgccgttggcaggatatctggaagatcagacagaaaaaaggggaaaggaagaacagacggaagtattggaagatgaggaaacgatcgcatggattcttcagtgtcaggcaaatgatgaacatgcggtagatgaagaggggaaactggtcggagcagagccggcaactcaggaaagtgctgtagaacagccggttcctggaatggatctttctattgagcggctgcatgattttgaatatctgacaagcaatctttatacaatagacagttctacaatgatcggaccggagcagcttaatgtggatgatcttttaaaccggagtatgaagatagatcaaagtacaggaggtccgaaaattttgatctttcatacgcattcacaggaagaatttgccgactccataccgggtgatccatctacaagcatcgttgggattggggaatatctgacgcagttattaaatgcggatgggattgagacacttcatgacagcggagtgtatgatattattaatgggaaacttgaccgcagcagggcatatgagaatgcagaaagtgcagtacggccggttctggaagcgaatccgacgattgaagttgcgatcgatcttcacagagacggtgtaaatgaggacacacatctggtaacggaagtgaatggaaaacagactgcgaagattatgtattttaatggattgagcaggacacggacaaatggcgatattgcctatctgtataatccatatatccaggataatctggcgttctccttgcagatgcagattgcatcggaacagtattacccgggatttgcaaggcatatttatctgaaagcttaccgttataatcttcatctgctgccaaagtctctgttgatcgaagcaggggcgcagacaaatacggtggaagagatgaagaatgcaatggaggtactggaacggacattaaagcgggtagttacagaataaacggttgtcggacagttacagtcctctcttgtcagaagaaggttgacagaacatatgagcgaaaaagaagttgaaaatcagatggttaaatgatatcatatttgttgattgactgtatagaacagtttgagttcgagaaagaaggagaaagagtaatggcgggaaataatacatacgatgcagggagtatcgcggtattggaaggtcttgaggcagtacggaaacgcccgggaatgtacataggaagtgtttctacaaaaggactgaatcatctgatctatgagatcgtggacaatgcagtagatgagcacctggcaggattctgcagtgagatccaggtgacattggaaaaagacggatctgcaaccgtttcagataacggccgtggagttccggttgatatgcatcagaagggtgtatctgcggctcgtctggtttatacgacactccatgcaggtggtaagtttgatgattctgcatataagacaagtggtggacttcacggagtaggttcctctgttgtaaatgctctttctacttatatggatgtgaagatcagcagggatggatttgttcatcatgaccggtacgagagaggaatcccggtgatcgaactggaagatggacttcttcctaagatcggaaagacgagaaagacgggaacaacggtaaattttctgccggatgatacgatctttgagaagacgaagttcaaagcggaagaggttaagagccgtctgcatgagactgcgtatctgaatccgaatctgacgatcgtgtttgatgataagagagatggaagcattgagcacatcgtttatcatgaaccggaaggaatcattggatttatccaggatctgaaccgtaagaaagaagtacttcatgacccggtttattttaaaggggaagcagacgggattgaagtagaggtaacactgcagtatgtgaatgagtttcatgagaatgtacttggattttgtaataatatttataatgcagagggcggaacacatctgacaggatttaagacaacctttacaactgtcatgaaccagtatgcgagggagataggaatcctgaaagaaaaggatgcgaattttaccggtgcagatatccgtaacggaatgacagcaattgtatccattaagcacccggatccgagatttgaggggcagacgaagacaaagttggataacccggatgcggcgaaagcagtcagcaaggtgacaggagaagagattgttcgtttcttcgatcgaaatctggatacacttaagacagttctttccagcgcggagaaagctgcgaagatccgcaagacagaagagaaggcaaagaccaatctcctgacaaagcagaagtattcttttgacagtaacggaaagctggcaaactgtgagagcagagatccgaagaagtgtgagatctttatcgtcgagggagattccgccggcggttctgcgaagacagcgagaaacagaaattatcaggcaatccttccgatccgtggtaagatcttaaatgttgagaaagcaagtattgataaggtgcttgccaatgcagagatcaagacgatgatcaatgcatttggctgcggattttctgaaggatacggaaatgactttgatattacaaagttgagatatgataagatcatcatcatggccgatgccgatgtcgatggtgcacatatttctaccttattgctcaccttattctatcgttttatgccagagcttatttttgaaggacatgtatatattgcaatgccgccactttataaggcaatgccaaagagtggagaagaagagtatctgtatgatgataaggcactggaacgttatagaaagacacatacaggtccgttcacacttcagcgttacaaaggtcttggagagatggatgcggagcagctctgggagacgacactggatccggagagacgtatgttgaaacgagtagagattgaggatgcccgaatggcttcgagtgtaacggagatgctgatgggaactgaagtaccgccgcgtcgtaattttatctatgaaaatgcgacagaggcagaactggatatctaaggagaagaagaatgagtaatgaatcacagatcataaggacagaatattctgatcttatgaaaaaatcttatattgattatgcgatgagtgttattatcgccagagcacttccggatgtccgtgatggtctcaagccggttcagcgtcgtacactttatgatatgtacgagcttggtatccgttatgataagccttatcgtaagagtgcacgtatcgtcggagatacgatgggtaaatatcatccgcatggagacagttccatttacgattctcttgtagtaatggcgcaggacttcaagaagggacaggttcttgttgacgggcacggtaactttggatccattgagggagacggagctgctgcgatgcgttatacagaggcgcgccttacgaagttcacgcaggaagtatgtctggccgatctggataagaatgttattgattttggtccgaactttgatgagacggagaaggaaccgcttgtgcttccgatgcgtgtaccgaaccttctgatcaatggtgcggaaggaattgcagtcggtatggcgacaagtatcccgacacataatctctgcgaagtggtcgatgcggtcaaggcatatatgaagaatgacaagatcactacaaagcagctgatgaaatatatcaaaggaccggatttcccgaccggaggaattgtggtcaataaggatgatcttccggcaatctatgagagcggacaggggaagatcaagctgcgtggaaaagtggaagtggaagaattaaaaggcggcaagaagcagcttgtgatcacagagatcccatacacgatgatcggagccggaatcggaaagttcttaaacgatgtctgcaatcttgtggaatccaagaagacgacagatatcgttgatatttcaaaccagtcttcaaaagaaggaatccgtatcgtgatcgaattgaagcgtggtgcggatgttgagaacctgaagaacatgctttataagaagacacgtctggaagatacatttggcgtaaatatgctggcggttgcgaatggcagaccggagactttaagtctgaaacagatcatagaacatcatgtagatttccagtttgagcttgcaacgaggaaatatacaactttgcttggcaaagagcgggagaagagtgaagttcaggaaggtctgatcaaagcatgtgatgtgatcgacctgatcattgagattttacgaggaagtaaatctgtaaaagatgcgcgtgcctgtctggtaaacggtgagacggaaaacattaagttcaagtctgcgatttccaaaaagatggcggcaatgctccgttttacagaacgtcaggcaacggcaattctggagatgcgtctttatcgtctgatcggtctggagattgaagcacttcagaaagagcatgagaagacattagaaaatattgcccgttatgaagatattttaaataactatgattccatggcaggcgtgatcatggaagagcttgacagttataaaaaagaattcggaagaaagcgtcgtaccgttgtggagaatgcagaagaagctgtttttgaagagaagaagattgaagagcagcaggtcgtctttctgatggatcgctttggttacgcgaagacagtggataccggagtctatgagaggaataaagaagctgcagacaaagagaataaatacattgtgcattgtatgaacattggaaaactctgtctgtttacagatgaaggcaagatgcatcaggtgaaggtgcttgatcttccacatggaaagttcagagacaaagggattccgattgataatgtaagtaattattcaagcagtgaagaacagattgttatgatctgtgaagaagagcagatgcgttattcaaaattattgtttgcaacagcacagggaatgatcaagcgtgtggatggaagtgagttccaggtatccaagcgcacgatcgcggcaacaaagctgcaggaagaagacaggcttgtcgcagtgaaggttgtgacggagtatcagaatgttgtccttcagacgaagaacggatatttcctgagatttttatctgtggatgttccggagaagaaaaaagcagctgtcggtgtcagaggaattaagcttcagaagaaggatgaattagaagaagtttatctttttgaagaaggaacagagacgaagattacttatggagaaaagacagtttcattgaaccgcctgaaactggcgaaacgggatggaacaggaaccaaaagccgctagaagtcttgcaggaagcggagacggtgaagaaagagaaagttaaggggatttctaaggtattgtaagaaaatgtgcaaaaacccttgatttcctcaaagaaaagtgctagagtaaatatagttacataaggaattggcagaagagtggacgaaagttcactcttctttggtgatatggagaattctttatgaatcagatcacaaactatattatagaagaaaaggagtttgacgcagcgtgtccagaagagaagattatgaacagcagacagaagcacttctcgagcctatcgtagaggaactcgggtttgagctggtagatgtagaatatgtgaaagaaggaggtacctggtaccttcgcgcgtatattgacaaaccaggcggaattgccgtggatgactgtgaggcagtcagcaggagattctccgatatccttgatgagaaggattatattgaagactcctatatctttgaagtaagttctccgggacttggaagaccacttaagaaagagaaggattttaagagaaatcttggagaagaagtagagatccgcacataccgtgcaatcgaccgacagaaagagttcgtcggaattttaaagagttatgatgagaatacagtgaccatcacatacgaagatgagacagagcagacatttgacagaaaagaaatcgctttgatccgtcaggctttggatttttaatttaggaggaaagaaaaatgaacacagaattactcgaagcattggatattcttgaaaaagagaaaaacatcagcaaggatgtcatgttggaggccattgagaattcacttttaagtgcatgtaagaaccatttcggaacatccgataatattaagatcgttatggaccgcaacacatgtgactactctgtatacgcagagagagaagttgttgaagaagtatttgatcctgcaatcgagatcagtcttgaggatgcagagaagatcaatccggcacttcatatcggagatatcgcacaggttgagcttcattccaaggaattcggacgtattgcaacacagaatgcaaagaacctgattcttcagaagatcagagaagaagagcgcaaggcagtatttgatcagtatttcgagaaagagaaggatatcgtaacaggtatcgtacagcgttatattggcaagaatatcagtgtgaatcttggaaaagcagatgcaatccttacagagaacgaacaggtgaaaggagagcatttcgagccaacagagcgtattaagctttatatcgtagaagttaagaacacaccaaagggaccaaagatccttgtatcccgtacacatccggaacttgtaaaacgtctgtttgaatcagaggttgcagaggtaaaggacggaacagttgagatcaagagcattgcccgtgaggctggttctcgtacaaagatggctgtatggtctaacgatccgaatgttgatccggtcggagcttgtgttggtatgaacggtgcaagagtaaatgcagtcgtaaaagagcttcgtggtgagaagattgatatcattaattgggatgagaacccggcacttctgattgagaatgcactcagcccggcgaaggttatttctgttatggctgatccggatgagaagattgcaggagttattgttcctgattatcagctttcacttgcaatcggtaaagaaggccagaatgcaagacttgcagcccgtctgacaggatacaagatcgatatcaagagtgagacacaggcaattgagtgtggagatcttccggagaactacatggagcagatgggtatggtcggagaagaaggctatacagtcggagaagaggaagaagagtacgatgatgttccggcagatgcagctgatgaagacggagcagatgagattgaattcgttgagacagacgaagagtaagatctgagggagtgaattgtttggcagtaaagaagaaagtacctatgcgtaaatgtgtaggctgcggcgagatgaaaccaaagaaggaactgattcggatcctcagaacagaggaagaagaatttgtcattgacacaaccggaaagaaaaacggacgtggagcgtatctctgtccgcagaaggcatgttttgagcaggctgtgaagaacagaggactggagcgttcctttaagcaggcaataccgcaggaagtatatgaacggctggaaaaggagatggatgagattggctagagataaagtactgtctctgatcagtctggcaacgaaagcggggcgctgcgcaagcggtgaatttatgacagaaggacagacgaagtccggaagagcaagccttgtagttgttgcagaagacgcttcagataatacaaagaaaaaattccgtgatatgtgtaaattttataaagttccaatgatagtttacggagataaagataccttggggcatgcgatgggaaaacaattccgtgcatctctggcgatattagacgaaggatttgcaaaaggaatattaaaagaactgaaatcccgtacctgatgaatgggagtagaagacaaaggttccccgttgattgcttgaaggaggtagatttatatggcagatgagaagatgcagaatgaaaataaaaagagtttaaacaccagggaggataacgtggcagaagatattagaagagaagcagctggcaaagatgctgagatggctgcagataaaacaacagaaaaagagggtgctccaaagaagaaaaatcttgcatttgtagttcgcccgcagaattcaaagaacagcagcagactgcagggaaaacgtccgggacagggacgtcagggacagaaccagggtcgtccaaacggtgatggaaaacgcccggcagcaggacagagccgttcgaatggtgaaggaaaaccggctcgtacagagaaaccggcagcaaaaagcgaaagaccggttcgtgcagcagaggacagaccggcacgtccggcacagaacggagcacgttctgagagaccgcagggatcaagaacaggacgtccgagtggtgagggaagacaggtacgctctgacagaccgggacagaaaccatttggagacagacgttctaatggcgagaacagaggcgaaaacagaggaccacgtcaggacagagacggacgcggacagcgttctgacagaggaggacgtgacggattccagggacgcgacaaccgtgatggaagagagaaccgtgacggaagagatggacgcggacagggacagcgctctgacagaagaaatgacaatcgcagaaacgacagaagtgacgctacaccgatcgtagaacagcagaagacacagagaaacaaagcgaaagacaaagaaagagataataagaagaaagaatacagagatgaagctttcgaaggaaaaggaagaaaaggcaagaagcagaaaccggcagtggaagtgaagaagccacaggtgaaggaagagaagcaggaagagcagatcaaacagatcgtgattccagaagttcttacaattaaagagcttgctgataagatgaagatcgttccttctgttattgttaagaagcttttcatgcagggcaagatcgtaactgtaaatcaggaagttgattatgagacagcagaagagatcgcgatggaattcgatgttctctgtgagaaagaagaagttgtagatgtgatcgaagaacttctgaaagaggatgaagaagacgaaagccttatggtaaaacgcccaccggttgtatgtgttatgggtcatgttgaccatggtaagacatctcttctggatgcaatccgtaacagtaatgtaacaggtcgtgaggccggtggtatcacacagcacatcggtgcatctgttgttgagattaacggagaaaagatcacattcctcgacacaccgggacatgaggcatttactgcaatgcgtatgcgtggagcaaactctacagatatcgcaatccttgtagttgctgcggatgacggtgttatgccacagacaattgaggcaatcaaccatgcgaaagcagcaggaattgagattattgttgcgatcaacaagatcgataagccaagtgcgaatgttgaacgtgtaaaacaggaactgacagaatacgaactgattccggaagactggggcggaagcacaatctttgttccggtatcagcgcatacacatgaaggaatccaggatcttcttgagatgatccttctgacagcagaggttatggaactgaaagcgaacccgaaccgtgccgcacgtggtcttgtgatcgaggctgagcttgataaaggtaagggatctgttgcaactgttcttgtacagaaaggtacactccacgtaggagatgcgatcgcagcaggaagcgctcatggtcgtgtaagagcgatgatggatgacaagggaagacgtgtgaaagaagcaggtccgtcccagccggttgagatccttggtctgaatgatgttccgaatgcgggagaagtattcgtaggatgtgagtctgataaagaagcaagagcgtttgcagagacatttatttcccagaacaaggtaaaacttctggaagagacgaagtccaagatgtctctggatgatctgttcaaccagatccaggaaggtaacctgaaagaacttgacattgttgttaaggctgatgttcagggatctgtagaggcaatcaagcagagtcttctgaagctgagtaacgatgaagttgttgttaagatcatccatggcggtgttggtgcgatcaatgaatctgacgttatccttgcatctgcatcaaatgcgatcatcattggatttaacgttcgtccggatgcaacagcgaaagatatcgctgagcgtgagggtgttgacttaagactttacagagttatctacaatgccatcgaagatgtagaggcagccatgaagggtatgcttgatcctgtctttgaggagaaggttctcggtcatgcggaagtacgtcagacattcaaggcatcaggagttggaacaattgccggtgcatatgtgcttgacggtatcttcgagagaaactgttctgttcgtctgatccgtgacggaatcgttgtattcgacggaccgctggcatctctgaagcgtttcaaagatgacgtgaaggaagtcagaacaggatatgagtgtggtctcgtattcgagaactacaatgacattaaagaaggcgatcaggttgaagcctacaagatggtagagacagaacgcaagtaagaataaaagatgccgacatttgcagagtgttgtaattgtcagcaggtgacagaattgttactcgtgcaggggtcatacattgcaggagtaacttttctgtataaaaaaggagttataacatgagaaagaacagtattaagaatacaagagtcaatgcagaagtacagcgtgagttgagtaatatcctgcgtggcgggatcaaagatccacgtgttgcaccgctgacatctgttgttgctgttgaagtagcaccggatcttaagacatgcaaggcatatatcagtgttctcggagacaagaaagcacaggaagatacgatcaaaggtcttcagagtgcagagggatatatccgcagagaacttgcacgtacagtgaatatgcgcaacacaccacagattacatttatcgtagaccagtccattgaatatggagtaaatatcagcaagaaaattgacgaagtgacaagagatttgaaggatggagctgaggaatagatgatcgtattaaacgatgtattaaaagggaaacacagtgtagccattggcggacacattcgtccggatggggactgcgttggttctacaattggattatatctttatctgaccacttattatccggagattgagacagatctgtatctggaggagattccagaagcatttcagatgatgggacacagagatgtgccgaagcatgagattgtagaaggcaaagtttatgaccttttcatcagtctggattgcggggacgaaagacgtcttggtttttccgagccaatgttccaaaatgcaaaggaaactttatgtgtggatcaccacgtcagtaacgagtcttttgcagacacgaattatatcgtgccggatgcaagttctacttctgaactcgttttccgtctgctggatgaggagaagattacggaagaaatcgcatctttcctttatatggggattgtgcatgataccggagtgttccagtattcctgtacttcaccggagacaatggaagtcggtgctgcacttttaagaaaagggatcaatggaagcgcgatcattgacggaacatattttgaaaaatcctatgttcagaatcagatgcttgggaaggcacttcttgagagtatgatgatcctgaataagaaagcggttgtctcagtgatacgtttgaaagaaatggagttcttccaggcaaaaccgtctgatctggatggaattgtcagcgtattgcgtcagacaagaggtgtggaggttgcaatccttctttatgagctcgaaccgcagacatttaaagtaagtcttagatcaaaagaaatcgttgatgtaagtgcagttgcgaaatattatggtggtggcggtcatgtgagagcagccggtgttacaatgaaaggttccccgtatgatgtgatcaacaatctgacacttttaattgaaagacagcttagagcggcagaagagaaaaacgaggaaaaatgataaacggaatagttaatatttacaaagaaaaaggatacacttcccatgatgtggttgcggttcttcgaaaagttgtcggacagaagaagatcggccatacaggtacgcttgatccggatgcaacgggagtccttccggtgtgtcttggaagagcaacaaaggtttgtgagcttctgacagatcatgataagacatatgaggctctgctgcttttaggaaagacgacagatacgcaggacatttccggagaggttctggaggagaggaatccgggcaatctgacggaagaggaagtacgttcctgtatcgaatcatttatcggagaatatgatcagattccgccgatgtactctgcgttgaaagtgaatgggaagaagctttatgagcttgcccgtgaaggaaagaccgtggagcgtaagagcagaaaagtccagatccatggaattcgcattctggagatgaatcttccgcatgtgcgtatggaggtggactgttctaaaggaacatatatccgtactttgtgccatgacattggagagaagcttcaggtgggcggctgtatggaagaacttgagcgtacgaaagtcggccatttcctgaaagaagatgcggtaacactggatgaagtgcgacagaagatggaacagggagaaggtgcagaacttttcactccgctggatcagatcttcgcggaactgccggccgttactgtgacggatgcgaaggcatggatgtcttataacggaaatgatcttccggagcgttttctgttagaaaaagaagcgtggacagatggacaggaagtcagagtatatgattccagaaagaattttatcggtctttatcagtatcgtgcaccgaagaagctgttccatattaagaaaatgtttctggatcctgaagcagagaaaattgagaaataaaggacgaataagacagacatgcaatatataaaaggattagatgcctttgacggaagaaatcacacagcggtaacgcttggaaagtttgatggattgcacagaggacatcagaagctgctcaacagaataatgaaatatgcgcagaaggaagattgcgacagtgtcgtttgtgcctttgacatggacagagactgtctgatgacaaatgaagagcgaagagcatttcttgaggacaaggtagattatctgatcgagattccatttacgagagaaatgatggagatggaagcagagaaatttatcgatgaaatcctgcataagaagctgcacgcatcacacattgttgtcggaacggactttaactttggtcatgaaaaaagaggaaatcaccagatgctggagaaatatgcagcgaaatatggctatacagttgatgtggtcgagaaagcatattacaaagaccgggagatcagcagcacttatatcagggaacttctcctcgatggaaatgttcctcttgcaaataagcttctggggtatccgtatgagatcaccagtgttgtggaacatggacagcagcttggaagaacacttggatttccgacaatgaatcttgcaccgcaggaaaagaaaatcctgccaaagtacggtgtctatgcctgtcgcgtccttgtggatggtgtatggtatggcggtgtgggaaatgccggggtgaaaccgaccgttgcgcaagagaaaagacggttgttcgaagtttatgtttacggatatgaaggcgatgcttacgggaagactgccacagtgcagatcctggagttcgaacgtccggaaacgaaatttcattcggttgaagaactcaaagaccgcgtgatgaaagatatgcggtacggagaggaatatctgaaaaatcatccattcgatgaaagataaaagattttaaatttgtgctttacaagcagatatctctgtgctatactatccgaggtatcaaatcagccggtgttcggtaatcggatcactccgaccattgcttaatgccaggcggtttaactaagaattttaaggaggatattacaatgatcgcaaaagagaagaaacaggctatcatcaaagaatttggaagaacagagggagatacaggatcaccggaagtacaggttgctatccttacagcaagaatcaacgagctgacagatcacttcaaagctaacccgaaggatcaccactcaagaagaggacttcttaagatggttggacagagaagaggacttcttgcatacctcaagaaagtagatatcgagagataccgtgctctgatcgagaaacttggtctgagaaaataataagattttccaaaaaagaagatcaattgacagatcagaagctgcatctgatgatgtggtttctggtctgtttctttttgtctgaatttttggtactttttgttctttttttggaaaactatttacttcttattatggaatatgatataatttaaaagcttgtgggcagagaagaaccgagaccactgaaaagtgtattatcaatcgattacagtgggcttcaattgctatggaatagtacatttttcagtagtttcggagcgaattgttctgctcatataaaacgaagataagataaaaaggagaaaaccatgtataaaaagtttgaaatggaactggccggcagaacactgcgcgtggatgttgaccgtgtggcaaaacaggcgaatggtgcagtgctgatgcattatggtgacacaactgtactgtgtacagcaacagcatctgacaagccgagagaaggaattgatttcttcccactcagcgtagagtataatgagagaatgtacgctgtaggaaagatcccgggaggatttaataagagagagggtaaagcatctgagaatgcgatcctgacagaccgtgtcatcgatcgtccgatgcgtcctcttttcccgaaagattatagaaatgacgtaacacttgagaaccttgttctttctgtagatcaggactgcagcccggaacttacagctatgcttggtgctgcacttgcaacaagtatttctgatattccgtttgacggaccaatctctacaacacaggttggactcgttgacggagagttcgtattcaacccgacagcagcacagaaggaagtatctgatcttgcattgacagttgcttctacaaaggaaaaggttatcatgatcgaggccggtgcgaaggaagttccggaagcgaagatgattgaagcaatctttgcggcacatgatctgaaccagaaagtgatcgctttctttgacacgatcgttgcagagtgtggaaagccgaaacatgagtatcagagctttgctgttccgcaggaactctttgatgcgatccaggagatcgttccggctgctgagatggaagaggctgtatttacagatgacaaacagacaagagaagagaatatccgtgtgatcacagagagactcgaggaagcatttgcagacaacgaagagtatcttgcgaagcttggtgaggctgtttaccagtatcagaagaagacagtaagaaagatgatcctcaaagatcataagcgtccggatggtcgtgcgatcgatcagatcagaccgcttgcagcagaagtagacctgatcccgagagttcatggttctgctatgttcacaagaggacagacacagatctgcacaatgacaacacttgctccactttctgaagcacagaagctcgacggtcttgatgaagcagagaagacaaagagatatatgcatcactacaacttcccgtcctactctgtaggagagacaagaccttccagaggaccgggacgtcgtgagatcggacatggagcactggctgagagagcacttcttccggtacttccaagcgagtctgagttcccatatgcgatccgtacagtatctgagacatttgagtctaatggatctacatcacaggcaagtgtctgcgcatccagtatgtcactgatggcagcaggtgtgccgatcaagtctgctgtagcaggtatctctgcaggacttgtaacaggtgagacagatgatgattaccttgtattgacagatatccagggactcgaggacttcttcggagacatggacttcaaggtagcaggtactcacgaaggtatcacagcaatccagatggatatcaagatccacggattgacaagaccgatcatcgaagaagcaatcgctgctacaaagaaagcaagaacttacatcatggatgaagttatgagtaaagcaatcgctgagcctagaaaagaagttggagagtttgcaccgaagattattcagatgcagatcgatccacagaagatcggtgatgttgtcggacagcgtggtaagacaatcaatgcaatcatcgacgagactggtgttaagatcgacatcgatgatgaaggaaatgtatctatctgcggtacagagaaagagaacatggagaaagctgcgaagtacatccagacaatcgttacagattacgaagcaggacagctttttgaaggaaaggttatcagcatcaaagaattcggagcattcgttgagtttgcaccgggtaaagagggaatggtacacatttccaagctttctaagcagagagttgacaaggtagaagacgttgtaagcatcggtgatgttgtgaaggttgtatgccttggtaaagataagatgggaagattcagcttcagcatgaaagatgttgcagaataagaatcagaaagaataagaaaagaggaacagaattcaggaaactgggttttgttcctcttttcttgtatgcgcaaggaatactttaagaatcttatccatatattgtgtagagaggaggggtacggacaacaactggagaggtggacaagatggaaatggaaagacagaacaagaagatgcaggtctggaatctgctggcagaaaaaatccgtaagcttgtagaagaatccgtcagtaatccggaggaactgcaggagatcaggatacgtacaggtcagccgctgctgattcagatgaaagggcaggaacgggttcttccggacccggtacacccgtatctggttacgaaagaagatattggtgagacaatgggatatatttgtcattattcgctctatgcatatgaaaatgagttgaaacagggatttattacagtggaaggaggtcacagggtcggggtggcaggaaaagtaattatagaaaatgaaaaagtaaaaaatatacagtatatttcttcgctaaatgtaagaatttctcacgaagtacttgggtgtgctgacgcattgattccatatattacggaaaataaacagatttgccatacattgatcatttctccgccgtgttgcggaaagactactttgatccgtgatctgatccgtcagatatcggatggaaatgaatacataaaagggtgttctgtcggtgtggtagatgaaagatcggagcttggtgggtgttatcttggaatcgcgcagaatcatctgggtacaaggactgatattttagactgttgtccgaaagcggaggggatgatcatgttgatccgttctatggcgccgcgtgtgatcgcagtggatgagatcggtacaagtgaggatatccatgccattgaatatgccatgcagtgcggctgccggctgatcgcgagtgtacacagccttgatatggatgaggcttctaaaaagccgatcctgggtgacctgatccgcagaagaatgtttcagcgttatgttgtgcttggacaggatcacggtcctggcaagatccgggaaatctatgatgagcgggggcgtgtgctgtgcagaaattagtcggatgttttctgatcttgttggcgacgaccggagcaggatggatgtatggaaaagaacttcggaattatctggaagaattgagtcattttcgcagaattatagaacaaataaaaggcgaattactgtatgcaggacttccgctttcggaaattttttataatattgcatcaagagagaaggaaccttatgaaaactggctgatggatctggcatttcaatgtcagggcacacaggaaaagcggtttgctgacttgtggacagatacgataggaaaagatcttccggaactgaaatggagagggaaaatgaatcctctgatctgcgaacctggggaactgcttgaaataggagacagagaaggtgtagttcgtctgctggagtatcatttgaaaaggctggatatggaaattgaaaagagaactgcggaaacgtctgagaagaaaaagctcggtagctggctgggggcagcaggcgggatttttcttgtgatccttctgctttaaaagggcgggaacaaaagggagaggagggagaatgtgagcatcaatctgatatttaaaattgcggcggtgggaattcttgtatctattctgagtcaggttttgaagcatagcggcagagaggaacaggcattcctgacaagtcttgcagggctgattcttgtattatcctgggttctcccggcgatttatgacttattttcttcgatccggcaattgttttctctttaaggagggcggaacagaattgaacagtatacaaatcgcacttttgggtgtcgtgggaacattacttgctttgcagtttaaaagtgggaaaagtgaatatggcatttatgtaagtcttgcagtcagcctgtttttatttctttgtatgctttcacgacttgaaatctttgtgcagacagtaaagaaaattgcagattatataaaactggatgccggacagatgagtattctgttgaaaatggccggtgtgacttatgtggctgaatttgcatccggaatctgtaaagatgcagggtatcagaatattgctgtacagattgagatttttacaaagttgacgatccttgcgataggaatgccggtacttcttgcgctgctggaactaatcggagattttctgatatgaaaagggaaaaatatttttggaaaaagctcttctgttttgtgtttttatttacggttgtgacaggatgtggcagcgtgtatgcagcagagcatggtacagcggaggaaaaggaaacagaagatcattccgggatgttggaggatgagctggaacaaatggaagaaagtctgctggatgaatttgatttcagacagatcgatcagttatcaggagagacagaactgggagaaaaagttcggtttcgtgatcttacagagatgctgatcagcggaaatacgaaggaattgggagaaagatttcttgagtttttttcaggacaggtgttctctgtttttcagaaaggaaggaagaatctggcgcgcctgctgctgattacagtggcggctgcatttttctcgaattttacaagtatctttcaaaacagacagacagcggaagcgggtttttatattttgtatcttgttgtgatcgcaatctgtctggaagcatatcaatcgatgaatttatatgccgaagaaaaaacaggagagcttgtccaattgatgcaggtgttttgcccaagtttctttctggcggttgcatttaccggaaagagcagttcggcgttgatgttttataatacaatactgttcctgatctatctggtggaactgcttgtacttcactttcttttaccggctgtgaagatctacgggatggtgagggtcttatcctgcctgaccggagaagatcttttctcagaatttgcagaacttctggaaaaatgtatccaatggagtctgaaaagtatgattgccgctgtgagtgggatcagtctgatccggggatttttgaatccggcaattgattctttgaaaatgactgctgcaggacgaacactggaggcggttccgtggatcggagatgttgccggaggtacaatggatgttgcattaggagttgcagtactgcttaagaatggaatcggtgtagcaggaatgatttttatagctgtcctggcacttattccactggtggaatttctgatattggcatttttgtaccaacttgtggcggcattagtccaaccggtttctgaccggagaattacaacatgcatatctggagttagttccggttatcagcttatggtgaaggtaatagcatccacgacactgttgtttgtcttaagcattgcacttgtggtggctgtaacatcttaaggtttcagaggagagaggaggaatctgccggatgcttacacaatggatacaaaaaatcatttcaatgcttctcgttatgagtgcagttctgcaggtgattccgggaaaggattatgaaaaatatattcgttttttctgtggacttgtcctgatcctgcttgcactatcccctgttgcggcgttgaaaggactgaaagcagagcagttttatcaaagggaagtgtatcagcaatatgagaaagaaatagagcggatgtcggattctataaaacgggaggaaatcggaattggacaataattggcaggagtggaaagaaaggatcgtgggatacacaaggaagataaaacaggcggatcgtggtcagaaaagaacaagattagccattttattcctgtgtggactgctgcttcttgtagttgcggttccggttccgaagacaggggaggtggataaggatacaaagattgacggggaatccgggaaaggagagacgtatgagacagattccatgacagactatgaaaaatatctggaacagaagacagcgcagacacttggtgtcgtagatggggcgggaaaggtgacggtgatgatcacattaaagtctacaggacagaaggtggttgaaaaagatcagcaaagcacacatcagacgacgaaggaagcagacagccaaggagagacaagagaaagtgaagagaaatctctggataaaacgaccgtgtacagtcaggggacagacggaacgcaggtcccatatgtaagtaaagaaaatgcaccggaagtggagggaattcttgtaatagcagatggaggtgggaatgcagttgtcgcgaagaatctgacagaagcggtgcaggcattatttggtgtagaagcgcataagataaaaataatgaaacgtgcgcctacataaaaggaggtttatcttaatgaaagggaaagtgaagaaaaaccagttgatcattgtggcacttgcggttatgatcgcggcagcaggatatctgaactacacgggacgtctgtttggcgagaatgcgaaaggaacaaaagaagctaatgcagatcttacaaaccaggaacttttagatatttcacaggaagatacagaagcaggaagcaaagaaattgaaagtaatgattctgaaacagaaggaacacctggagaggcggttctcacaaatggttcagcccagactacggtagcccaggcaaaagttacaagagaacaggtgcgtgcccagaataaagaaacactgcagtcgatcatagacaatacagagctcagtgaagaggaaaagtcagatgcagttgcacagatggtggagcttacaaagcaatcagagacggagatggaaattgagacattgatggcaacaaaaggattttcagaggcagtagtaagtctgggggaagatagtgcagatgttgttgtaaatgcagaggagcttacggatgcaaaccgtgcccagattgaggatattgtgacaagaaagtcggatgtaaagccggagaagattgtaattacaccaattcatgaatagaaagtatatttttggaaaaactttttataaaagatttgctgtcagagaggacttgtgatacactatttactggtttattatgtaactgtctacgggatgcctgcggacagttatctattgcgtgaaaatgataggagattagaaatgtcagaaattacgaatgagataaagaaaagaagaacatttgccattatatcccatccggatgccggtaagacaacattgacagagaaattccttctgtacggaggagccatcaaccaggcaggatctgttaagggaaaagcaactgcgaagcatgcggtttccgactggatggagattgagaaggagagaggtatttctgtaacttcttctgtacttcagttcaaatatggtggatactgtattaatattctggatacaccgggacatcaggacttctcagaggatacataccgtactttgatggcagcggattccgcagttatggttatcgatgcatccaagggtgttgaggcgcagacaagaaagctgtttaaagtctgtgtgatgcgtcacatcccgatctttacatttatcaataagctcgaccgtgaggcgaaggatacatttgaattgctagatgatatagagaaagagcttggaatcgcaacttgtccgatcaactggccaatcggttccggtaaggaattcaagggagtttacgacagagcaaaacgtgaagttgagctgttctcagatacgaaaaaaggtactgcgatgggtgaggtgaagacagtaccgatcgatgcaccggagacagaagaactgatcggagcagatgcaaaagacattcttgcagatgagattgaacttctggacggagcagcagctgagtttgatcaggaactggttgataagggacagctttcaccggtatttttcggatccgctcttaccaactttggtgtagagactttcctgaagcatttcctgaagatgacaacctctccgcttccgagaaaatcagatcatggcgagattgatccaatgacagaaaaagacttctcagcatttgtatttaagatccaggcgaatatgaacaaagcccacagagacagaatcgcattcatgagaatctgttccggagaattcgaggccggtatgagtgtttatcatgtgcagggaggaaaggatgtgcgtctttcccagccgcagcagatgatggcaagtgaaagaaagatgatcgataaggcttacggcggagatatcatcggagtatttgacccgggtatcttttcaatcggagatacattgacaacatcaaaagagaaatttgcttacgaaggaatcccgacctttgcaccggagcactttgcacgtgtccgtcaggttgatacgatgaagagaaagcagtttgtaaagggaatcaatcagattgcacaggaaggtgcgatccagattttccaggaattcaacacgggtatggaagagattatcgtaggtgttgtaggtgtacttcagtttgatgtattgaagtatcgtctccagaatgaatataatgtagagatccgtctggagaatctgccatatgagtacatccgttggattgagaatgaagagatcgatatggatcgcttgagcggaacatctgatatgaagaagatcatggatctgaagggacgtccgcttcttctctttgcgcatgagtggagtatccgtatgacagaagagagaaatgaaggacttattttgtcagaattcggacgttcataaaaatcttttcaaatagaaagatttttgatataatgtagaaagaatcagacaaaacaggaggttttgattatggcaaaggacgaaagaaatatttatacaatacagaacgacgcaagcaaaggtgagattaagattgcagatgaagttgtagcaatcattgcagcgcttgctgccacagaagtggaaggtgttgcttctatggccggaaacatcacgaatgaactgatcggaaagctcggaatgaagaatctttccaaaggtgtgaaggttgatgtactggaaggtattgtgactgtatccttggcattgaacctgaagtacaattacagcatcgttgaggtgtctgcaagagtgcaggagaaagttaagaatgcaattgagaatatgacaggacttgaagtggctgatgtgaacattaaggttgcaggagtcgagatggagagtcaggaataaaagcgaacaggaaaggaatcagccaacatggttagaaaagaacttcgcgagcacattttcaagatgttgtttcagatagaatttaatgatccgcaggagatgccggagcagattgaatactatttttctacattggaagatgcagcggataaggataaagaatatattaagagaaaatatgcggcagtacttgagaagacagaagagattgatgaactgatcaatgcgaatgcaaagggatggaagacgacaagaatgaacaaagtagatctgtccattctgagacttgcggtatatgagatgaagtgggatgacgaggtaccggtaggagttgcgattaacgaggcagtagaactggcaaagatgttcagttcagatgaggctccgtcatttattaacggagtacttggcaagattgcgcgttcactggaagagacgaaagaatgaaaaatgtctatacggtgaagcaggttaattcttatattaagaatatgttcacccaggacttcatgctgaaccgaatctatgtaaagggtgaggtgtctaatttaaagtaccacacatcagggcatatatatttttcattgaaagacgagtccggcacgatagcctgcgtgatgttcgcaggctcaaggtctgggctttcttttcatatggaggaaggacagcaggtagtagtgctgggggcggtcagtgtctatgagcgggatggaaagtatcagctgtacgcaagagagatcattctggacggtgcgggacttttgtatgaaagattcgaggcactgaagaaagaactcgaagagatgggaatgtttgcagcagagtacaaacagccgattccacgctatgcacgtacgatcggggttgtgaccgcaccgacaggagcagcgatcagagatatcatcaatgtggcaaagagaaggaatccatttgtccagatcctgctttatcctgcactggtacagggtgatggtgccgtgagcagcatcgtgaaaggaatccgtatgctggaagagaagcaggtggatgtcatgatcgtcggaagaggcggaggaagcattgaagatctgtgggcattcaatgaggaggctgttgcacgtgcgatttttgactgtcgcgttccggtgatctctgcagtcggacatgagacagatacaacgattgccgattatgtggcagatctgagagcaccgacaccatctgcagcggcagagcttgcagtgtatgaatattccgaagtgaaggaacagattcttaattgtgagagtttacttcgaagagcaataaatcagaagctgctaaacgagcgtgtgcatttggaacacagcagattgaaacttcagacactccatccaagacagaaactcaatgagaagagacaaagaacggttgacgctgagaatacactgcgctcgcttatggagcggcatctgacaaaagaaaagcacagactcgcactttgtgcagaacggatgaagggattgtctccacttgagaaattaagtcagggatattcttatgtctgcaatgcacaaggacagaatataaagaaaacagatcaggtaagagaaggagatttgttgcagatttatgtaacggatggacagattgagacttacgttacagacactgtaaaactagaaggggaaagaggacaaagttcccataaacagtaaccgggaggaaatgatgaaagacacgaagaagatagaacaggctgcaagtcttgaggagttatttgagagactggatcgcgtcattggcggactggaaggagaggagctttctcttgaagattcttttaatttatatcaggaaggcatggaacttgtgaagtgttgtaatcgtacaattaacgatgtggaaaagaaagttcttgccttggatgagaatggagagagtcatgaattttaaagaagaacagaaagaaaaagtagaaaaaattgaagcgatactcagagaatatcttccggaagcaaacggatatcagagtgtgatcatggaagcaatggaatacagtctgatggcaggaggtaagcgccttcgcccaatgctgatgatggaaacataccgtctgtttggtggagagacagaagtgatttatccgtttatggcagcaatggaaatgatccatacctattcactggttcatgatgatctcccggcaatggataatgatgagtaccgtagaggaagaaagacgacacatatcgtttatggagaggatatgggaatccttgcgggtgatgcacttttaaactatgcatttgagacagcatgcaaggcgtttgagcaatttccggaggaaagccttagaatcggacaagcgatgagagttctggcaagaaaggccggaatctatggtatgatcggtggacaggttgtagatgtgaaagaatccggacatcagattgatgaggatgttcttgattttattttcagactgaagacaggtgcactgatcgagtctgctatgatgattggagcaatccttgcgggagcatcaaaagaagatgtaaagagtatgcagaaaatcgcaggaaagatcggaatggcattccagatccaggacgatattctggatgtgacaagcacgacagagcagctgggcaagccggtacatagtgatgagaagaatgaaaagacaacatatgtaacacttaaaggaatcgaacaggctcataaagatgtggaacgtatgacagaagaagcaatcgatgaactgaaaaagttccctgccggggataatttccttgagcagcttttgaaatctcttgtatatagagaaaaataagattgtcggtgaggaggaacttatggcacttgaaaagattcaaaaggccaacgatataaaagaactgacagaggaagagctgaaagaattatcggatgagatccggcggtttctgatcgaaaagatcagtgtgaccggaggacatctggcatccaatctcggagttgttgagcttacgatggcattacataaagtacttcatttcccagaggataaactgatctgggatgtgggacatcagtcttatacacacaagcttctgacaggaagaaaagaaggatttgatgatcttaggaaatacggaggaatgagtggattccctaagagaaaagaaagcaaatgtgatgcgtttgatacaggacacagttcaacttcaatctcagcagggcttggttatgtggccgcaagagagcttcaacaggagcattataacgttgtatctgtgatcggagatggttctatgaccggcggtatggcatatgaagcattgaataacgcttccagattgaaaagtaattttatcattgtactcaatgataatacgatgtccatttccaagaatgttggtggtatgtcaaattacctgaatgggcttcggacgacacaggtatactcagacctgaagagaggtgtcgaagatacgatcaagaggattcccggcaggggagaacggatcgtccatcaggtgaagaagacgaagagcgggatcaaacaattatttgttccgggaatgttttttgaggatatgggaatcacatatctgggtcctgtagacggacatgatctgaagacattaacaaagacattgaatgaagcaaaacgggtaaatcatgcagttcttgtacatgttgtgacaaagaagggaaaaggttatcttccggcagagacgaatccgtcaaaattccatggaacgggaccttttgatgtgacaacaggagaaacgatcggagggtcggggaaggattcttatacagatattttttccaaagtgcttgcagatatcggaaagaaggacaagaaggttgtagctattactgcagcgatggcagacggaaccggactttccagattcgcaaagctatttccggaaagattctttgatgtaggaattgcagaagagcatgcgatgacatttgcagcaggacttgctgctgggggaatgaagcctgtttttgcggtgtattcatctttcttacagagagcgtttgaccagacgattcatgatgtctgtcttcagaatctgccggttgtgatcgcagtagaccgcgcaggtcttgttggaagtgacggagagacacatcagggagtctttgatttatcatttttatcattgatcccgaatctttcaatcctgtcaccaaagaaccgttgggagatggcggatatggtgcgctttgcagtagatttccagtatccgattgcacttcgttatccaagaggagaagcatatgaaggactgaaggaattccgtgctccgatcgaatatggaaagagcgaacttctatatgaagagagtgagatcgcggtaatgtttgtcggacatatgtctttccttgcagaacaggtgcgtgaggatcttaaggcagcagggtatcagtgtagtctgatcaatgcaagatttgtgaaacctctggatacagagaggatccggaagatttcagaaaatcacaggatccttgtgacaattgaggaaaatgtgcttacaggtggatttggtgagcaggtagaagattttgtgatgcgcgagggtatcccattgaaagtttgcacaatcggtatttcagatgattatgttgaacatggaaatgtagatgtcttaagaaaagaagttggtctcgacagagagagtattgtaaaaaaggtcattgcagatgatcagagaataaaggaagaaaagtaacatgaaagaacgtttggatgtattgcttgtaaagagaaatctggcggattccagagaaaaagcaaaagcaattattatgtcaggaaatgtatttgtagaaggtcagagagaagataaggccggaacaacatttccagaggaggtaaatattgaggtacgcggacatgttctcccctatgtgagccgtggaggtcttaagcttgagaaagcaatgaaagaattccatgtgacagtagatggaaaggtctgtacagatgtaggatcttccactggcggattcacagactgtatgcttcagaatggagcaaagaaagtatttgccatcgatgtgggaagaggacagctggattggaagctgcgtcaggatccgagggtggtatgtatggagaagacgaatatccgttatgtgactccggaagatcttggagaacctgttgatttttcgtcgattgatgtttcgtttatctctctcacaaaagtgcttggtgcaatcagagcgtatctgacagatgatggagagattgtagcattgattaaaccacagtttgaagcaggacgtgagaaggttggaaagaaaggtgttgtgcgagaaaagagtacacatcatgaagtaatcgagaaagtgacagaatttgcggtatcaatcggattttctgtacttgagatcacattctctccaatcaagggaccagaaggaaatatcgaataccttgtacatttgaagaaatgtccggaagaggaagcaaagattgagacaaaggaactggatcaggtagtggatgaagcattcgctgctctggcaaagtaaaaaggtgatggtatggaatctttttatatcataacaaatcaattaaaagacagagattattctgttacgattgagataaaagattatattgagagaaaaggcaaatatgttattcttgcgcaaaaggacgaggaaggatttattgttccgggaacgattccggagaacgttgattgcggactggttttaggtggggatggaactctgatccgtgcaatacgtgaccttgaaggaaataaacttccgcttcttggaatcaatatcggaacgttgggatatttggcagatgtagaattgaaagattataaatctgcgattgacaggctttgcgaggaagagcctaaagttgagaaacgtatgatgttggaggggacaatgtcatccggtgaaaaagatctggcggtaaatgatatcgttctgacaagagaagggaatcttcgtattgttcagtttaatgtatatgtgaatggaacattgttgaatacatatcaggcagacggtgtgatcatctgtacaccgacgggaagtacaggatataatctttccgcaggtgggccggtggtagagccaacagcaagtctgatagttatcactccaatctgttcccatgcacttaacacgagcagtgtggtgctttcagcagaggatgatgttgaagttgagatttgcgagggccgttatggaaggcaggagaaagtagctttatgttatgacggcgctgtacagagacaattggttagcggagacagagtgaagatcagaaaatcagatgccaaagcgcatcttgtaaaattaagtgaagaaagttttatgataacaatgcgcgagaagatgaaaggaaattgatactatgaaagtgagccgacatgcaaagataattgaattgatcagtcagtatgacatagagacgcaggaggaactggcagaatatctgaataatgccggcttcaaggtcacacaggcaactgtctccagagatatcagagatctgaagctgacaaagttgtctgtaaacggtgggcgtcagaagtatattgtccatagacaggaagatgacggaatgaacgaaaaatatatccgtgtgcttcgtgacgggtttgtttccatggatatggcacagaatatccttgtgatcaaaacagttgccggaatggcaatggcggttgctgctgcagtagatgcaatgaaatggaatgaagtggtcggatgtattgcgggagatgacacgatcatgtgcgcaattcgtacagttgaagatacagctgtagtaatggagaatataaggaaattggtttcaaggaaagcataggtgatatatgttacagaatctgtatgtgaaaaatcttgctttgattgatgaaacagaggtagagtttggggaaggattgaatattctgaccggtgaaaccggagcaggaaagtcaatccttcttggctctgttactcttgcactgggtggaaaatacaatgcacagatgcttcgaaacggggcaaaaagcggattggtagaacttacttttcacatcaaagaagaaaagattttaaagaagctggaggccttggatatttatccggaagacggatatctgacattgagccgccgccttttagaaggccgaagtgtcagtaagattaacggtgagacagtgaatatgagcgtccttaaagatgtagccagtcttttgatcgatattcatggacagcatgataatcagacattgcttcatcgaaagaatcatttaacactgcttgatctttatgggaaagaacagacggatccgttaaaagaaaaaatggcttcctgctatcaggaatggaaggcagtatgtaagaaggtggaacaatcttcgctggatgaagagagccgaagaagagaactttctcttgctgaatttgaagtgaatgagattgaagaagcagctcttaaagaaggtgaagatgaacttttagaagaacagtatcgcaagatgacagatagcagaaaactcacagaaggagttgcagaagcgtatcagtatactgcagaggacgaacgtggaaatgcaagtgattacttaagccgtgcaatccgaagtcttcaggaagcagcatcttttgatgaaaagggaagccagctttatgatcagatcgtggagatcgatagtctgctgaatgatttcaaccgggatctggcagaatatgcaaagagttttgaatattcggaagaagagttttcagaagttgagtcccgcctgaatgaagtgaatcatttaaaggcaaaatatggaaacactgtcagtgatatccttgcatattgtgaggaaaaaagacagagactatcggaactggaagattacgattcttttatgcaggaacttttggagaaacagaaaaaggcagaaaagcagatggaaaaggctgcgatggaactgcatgaagtgcgtgaacaaaacgcagttaaatttgccgaggaaattgttcatcagatgtcggaactgaatttcatggatgcacgttttgaaattcgtttgacagaagcaaaaagttattctgcacaaggaaaagatgatgcagagttttatctgtcggttaatccgggagaacctgtgcgtccactgggggatgtcgcatccggaggagagctatcccgtattatgcttgcaatcaagaccgtacttgcagatgaagaagatacaccgactttgatatttgatgagattgatagtggaatatcaggaatcacagcaggtcgtgtcggagagagactgcagttgatcggaaagagccgtcaggtaatttgtattacacatctttcacagatcgcagcggcagcagatattcatttttgcattcataaagaggcagaagataattctgtgagaacacagatcgagagacttgatcaggaagactctgttgcagagcttgcaagacttcttgggggagcaaatgtgacagatggaatcatagacagtgccagagaaatgaaagaactggcaaaaagagaaaaataataccagtgtgaaaagaagaagatccacacatactaagagcagatgcaaacagcatctgcttttaatatttgcaagagaggagtgtggatcatgaaagaacgcaggaaaaggaatatgagcaggacaggtctgttgtttatgttctgcttattgatgctatgtggctgtgcacagactacaggatttatggaaaatacggaagtcagtggccgggaagtggaaagtctggctgcggaaaaggaagacgatacggttctacttggaggaatgccggttggaatttatatggaaacggatggtgtactggttttagacacggagaaaatgacggggatggatgggaaggaatatacacctgcacagggtgtagtgagttccggtgattatattacggaagtgaatcaccagaagattgaggggaaaaaacagttgatggatctggtggaacatctggatggagagaaggtccttctgacagtcagacgtgaaaatacgatattagaaaagaaattgactcctgtgcagatttcaaaaggaaattatcgacttggaatctgggtgagagataatgtacaggggcttgggacaatcacatttttgacaaaaaataacaggttcgcagcactgggacatggtattcatgatattgatacaagtacacttcttacgatcaaaagaggaacgctttatagaaccagtattcagaaagtgcaaaagggaagcaaagggaatcccggaacaatggaagggattattgtttataatcggtttcatcggcttggagtgatcgagaaaaatacggatgcaggtatttatggagaattaaattcagacagaagctggataggagaggaagttccgatacaggtagcaaaaaaagaggaaataaagacgggggaggcaaggattcgctgctacattgatggtgaggtgaaagaatacacaatctgtataacacaaattgacaaagaatccgaccaggtgaacaaaggaatggtaattcaggtgacagatacggaattgctggaaaagacagggggcattattcaggggatgagcgggagtcccattattcagaatggaaaactgatcggagctgtgacacatgtgtttgtacaggattcgacaaaaggatacggtatttttattgaaaatatgttgaaagaggaagaatcgtgaaaagggtcgaaaaggatgtcgaaatactactgcaagattttcttgaatacgacaaaaaagctggaatataatacacgagtggtgtaacaagacaaacgttctcagaaaaaggagagaagaagatggaacatttgaaaatagccattgctgatgataaccagaaaattttggatcttttggatcgtgtgatcgggatggaaaaagacatgaatctggtcggaaaggcgaaaaatggtgaagagatgtgtcagatcatcaaagataaacagccggatgttgttcttctcgacctgattatgccgaaaatggatggattgacggtcatggatcggatcaatcatgacaaaactgtcagcaagcatccgtattttatcgtaatcacagcagttgggcaagaaaagattacagaagatgcttttaataaaggtgcaaattactatatgatgaaaccgtttcaaaatgagatgttgttagaacgaatccgaagtgcggggcggatgtcacacggtatggaaacaagaagctctgaggcggcatctgataacagaggagaaagtctggagacacgagtgacaaatatgctgcatgagatcggaataccggctcatattaaggggtatcattatctgagagatgcgattatgatggcggtagatgatatggatgtgctcaatgcgatcacaaagatcctgtatccaaccgttgcaaagaagtatcagacaacatcaagcagagtagaacgtgcgatccgacatgcgattgaagtggcatggagcagaggaaagctggacactctggatgaactttttgggtatacagtaagcaatggaaaagggaaaccgacaaattctgaatttattgctttgatcgcagatacaatacaattggaatacaggcatgggaaataagaagtaaaatacaatgagaaatcctttgcattatgataaaaatgcggtataatattttataagtaattgccgaaagagggcaagtgaaagtggaggatctaagtatgaaaaacattttgttcgcttcatcagaatgtgtaccatttataaagaccgggggtcttgctgacgttgtaggttcacttccaaaagattttgataaagagaaatatgactgccgtgtagttttacctaagtacatgtgtatgaaacaggagtgggtagagcgcttggagtatatcacaaacttctacatggattttgcaggagagaatcgctatgtcggaatctttaagacagaattaaatggagttacattttatttcattgataatgaattttatttttcaggatttgctccatatgatggagatccgaagtggaatattgaaaaattctctttcttctgtaaggcagttttaagtattcttccggtcattgggttccgtccggatctgattcactgtcatgactggcagacaggtctgattccggtatatctggataatttccgcttctttggagaatattacagaggaatcaagacagttatgacaatacataacctgaagttccagggggtatgggatacaaagactgtacagggaattacaggacttccggattattatttcgttccggataagcttgaggcatacaaagatgctaatatgctcaaaggcggtattgtttatgcagataaggtgacaacagtaagccacagctatgcagaagagatcaagacaccgttctatggagaaggtcttgacggactgatggcagcaagatcaaatgatctttgcggtattgtgaatggtctggattacaatgactggaatccggatacagatcatagaatcgcaaagacatttaatgttgagaatttccggaaaaacaaaccggtgaataaggccgctcttcaggaagaacttggactggataaagacaatcatgtaatgttgatcggaatcgtttcccgtctgacagaccagaaaggatttgatctgatcgattatatgatggatgagatgtgtcaggatgcagtgcagattgcagtacttggaacaggagatccgaaatatgagaatatgttccgtcactttgcatggaagtatgcaggaaaggtttcagcgaatattttctattccgatgatctttctcacagactttatgccggatgtgatgcattccttatgccatccttattcgagccatgcggactcagccagctgatgagtctgagatacggaacacttccgatcgttcgtgagacaggaggattgaaagatactgtagaaccgtacaatgagtttgagaagacaggtacaggattcagtttctctaattataatgcacatgagatgttgaacactgtacgttatgcagaaagaatctattatgataagaaacgtgactggaacaagatgatcgagcgcgcgatgactcaggatttctcatggatgaattctgcaagacagtatgaagatctgtacagaagtctgatcggagaataagaattataagaagtaacaaagaagtaatacaagagtaacacaagagcaaggagtaacagacccgatgaaaattattgacaaactgaaccagaaaggcatccacatttcttttgaggtgtttccgccgaagacagatgcaggatttgacaaagtattatcagcaacagatgagattgccaaactgaacccatcttatatcagcgtaacctatggagccggtggcggaacaagcaagaacacagcgaagatcgcatcccatattaaggacgatcttggagtgatgagtcttgcacatctgacatgtgcttcatccacaaaagaagaagttggagaggtgattgaaaacctgaaggctcatggaatcgagaatattctcgctttacgaggagatattccggaaggcatgacattccctgatggagatcgattccattatgcttatgaactggtacaggaaatcaagaaacatggggatttctgtattggtgcagcatgttatccggaaggacatgtggagcaggaacataaagaggatgatatccgttatctgaaacagaaggtagacagtggagttgatttccttacaacacagatgttctttgataatgatatccattataatttcctgtacagaatcagagaagcagggatcacagttccggttctgccgggaatcatgccgattaccagtgctgctcagatgaagcgaagccaggaactttccggaacagtatttccgagaagatttcttgcaatattagatcgcttcggaagttctccggaggcgatgaagcaggcgggaattgcttatgcgacagatcagattattgaccttcttgcgaacggtgtgaataatattcatatttattctatgaataagccagagatcgcaattgcgattatgaataatctttccgagattatcaagtgttaagaaagtgaatgaccagatgatagagacagagaagagagtacgtgaagcagttcgttatctgggatttggaaaaaatgaggcagatgaacgaaccttggaactgatccaacagtctttcaaagacctggaacaggaagcagggcctaagtccatctgccaaatttttgatctgaatcatacagatgacggaagactggttattggacagatggagattcgaagtaagagcctgagtagaaatctgaaaggatgccgtcaggttgttctttttggagcaacacttggcgccggagttgaccggctgatgcgcaggatttctttgacagatatggcaagagcagttattttgcagtcttgtgcagcagcaatgttagaagaatattgtgatgagtgtcagaagaagattgcggcagagcttgaagaagaacatttgtatttaagaccgagattcagtcccggatatggagattttgatatctgttatcaggaaccagtcgtacgaatgttgaattgtgcaaagacaatcgggttgactttgacagacagctttatgatgacaccaacaaagtcggtaacagcagtaattggaatcagtacacagaaggacagatgtccaatctcaggatgtgaggtctgtacaaaaaaagattgtgaataccgacgataagcaagagataagagaggaaggattgatacaagaagatgatacgagaacgcctgggaaaagagttattatattttgacggcggaatgggaaccttgcttcaggcaaagggacttcagccgggagagttaccggagacgtggaacgttacacatgcggatgagatcaaaaacattcacaaacaatatatttcagcaggaagtgatattgtacttgcaaacacatttggagcgaatgcattgaaattccattgcgatgattttccattggaagaaattatccgtcttgcgatcaggcatgtgaaggatgcggctgaagaggcaagtggtggaagaagaatctacacagcactggatgtcggaccgacaggaaagcttttaaaaccgatgggtgatctggacttcgagacagcatatgagacattcaaagaagttatgatcctcggagagaaagccggtgcggatctgatccatattgagaccatgagtgacacttatgaactgaaggcagcagtacttgcggcgaaagagaatacatctcttccggttttcgctacgacgatttttgacgagcgtggaaagcttctgaccggagcagatgttccgtctgttgtggcaatgcttgaaggattaaggatcgatgcccttggaatcaactgtggaatgggaccggagcagatgctgccgatcctggagcagatcatgaagtactcttctgtgcctgtgatcgtcaaaccgaatgcaggtcttcctaagcagaaagacggagaaacttattacgatgtttctccggaagaatttgcttctgttatgcgtcatgttgttgatcttggggcagttgtgatcgggggatgctgcggaacaactcctgcacatattgcagagatggtgaagcagtgtaaagacattccggtgaagccgattgagaagaaaagttatactgtagtatcttcttatggacagagtgtgttccttggaaccggatcaaagattattggtgagcgtattaatccaaccggaaagaaacgctttaaacaggcgcttaaggaacatgatcttgattatattttaaaagaaggaattgcacagcaggataacggtgcacatattctggatgttaacgtaggacttccggatattgacgagccgacattgatgaagaaagttgttcaggaacttcagagtgtgacgaatcttccgcttcagattgatacggttgatacggttgcgatggagaatgcacttcgcatttacaatggtaaggcgatggtcaattcagtcagtggaaagcaggagtcaatggatgcagtattcccactgatccggaagtatggcggtgttgtgatcggcctggcacttgatgaagacggaatcccggcaacagccgagggacgtgtacagattgcgaagaagattatcgcagaggcagcaaaatacggtatcgagaagaaagatattgtaattgatgccctggcaatgacgatcagttcagaaccggaaggagcaaaggtgacacttgagacacttcgcagacttcgtgacgaagttggtgtgtgtactgtgcttggtgtatcaaatatttctttcggtctcccaagcagaccgattgtaaactccatcttttatacgatggcaatgcagaatggtctgagcgttggaattatcaatccgaactcggaggatatgatgaaggcatggtatgcataccatgcgttaatgaatctggacagcaactgtgagaattatattaataaatatgcacagcagccgggaacagctccggtttccgcaacaggttcagctcacaagatgacactgaaaagtgcaattgaaagagggcttcgtgaagaggcgaacagcattacatctgagatgattcaggagaaagatggtctggagatcattaacgaagagctgatcccggcactgaatacggtaggtgaaggatttgagaagggaacagtctttttgcctcagctactgatgagtgctgaagcggccaagacagcatttgcggtgcttaaagagaaaatggatagcagcggagaagttcaggagaagaaaggaaagatcattcttgctacagtaaaaggggatatccatgatatcggtaaaaatatcgtgaaggttctgcttgaaaactatagctttgatgtgatcgatcttggaaaggatgttccgccggagacaattgttgacacagtacttgaacaggatattcatctggtaggattaagtgctttgatgacaacaactgtcgtaagtatggaagagacgatcagacagcttagagagaaagctccgcattgtcttgtgatggtaggaggcgctgtactgaatcaggactacgcagatatgataggagctgatttctatggcaaagatgccatgcagtcggttcattatgcacagagagtttttggaactgaagaataggaggaaatcaaaaatgagaggattacagacaccggtccgtgcaattcgaagacaggtatttacagaagttgccaagcttggatttaaagcaaatgcagagacattggtagcagatatggaagcaattccatatgaaatcgtaggagaagattcagaagtaaaataccgtgagagcatttatcgtgcaagagcagtcgtaagagaaagactccgtcttgcgatgggactttcccttcgtccggagaataagccggtccatttgacagcgggagttgaggccagtaatatttctgaaaaatattatgagccgccgctgatgcaggtgattccgtcaggctgcgagagctgtgaggagaataaatacgaggtcagcaatgtatgtaagggctgccttgcacatccttgtcaggaagtctgtccgaggggcgctatttccatggtgaatggaaaatcctttatcgatcaggataaatgtatcaagtgtggaaagtgcaagtctgtctgtccatacgatgcgattgccaagaaggagcgtccttgcaagaaagcttgtggagtgaatgcaattacatcggataaattaggacgtgcttatattgatgctgacaaatgtgtttcctgcggaatgtgtatggtaagctgcccgtttggtgcgatctctgacaagtctcagatcttccagctggctcgtgcactttcagaaggagaagagattgtggctgaggtagcaccggcatttgttggtcagtttggaccgaatattaatgtaagaaacttcaaagcagctcttgaagaactcggattttcagagacatatgaggttgctcttggagcggatatcggagcaattgcggaagcacatcattatgtgaataaagtgacaaccggagaacttccatttcttctgacatcctgttgtccatcttgggcaatgcttgcgaagaagttcttcccggatctgatcgatcagatctcacaggaactgactccgatggttgcaacagcacgaacaatcaaacaggaacatccgaatgcaaaggttgtatttatcggaccttgtgcagcgaagaagctggaagcttccagacgtactgtgagaagtgatgtggatttcgttgttacatttgaagaattgcaggcaatgtttgatgcgaagggaattgatctgacagcttatgaggcagagtcttctttccatgatgcgacaggagccggacgtggatacgcctgtgcaggaggagttgcaaaggcaatcgaagaatgtattaacgagtattaccctggaacgcaggttaatatcgagcatgcggaaggtctggcagaatgtaagaagatcctgacacttgccaaagccggaagaatgaacggatgtctgatcgagggtatgggatgtcttggcggatgtattgcaggagctggaacgaatattccaatcccgactgcgaagaaggatgtcgcagcttatgtcaaaaactcaagcagagcacttccaccgaaagaactggaagaaattgaactgaaataagtaaatataaggataataaccggcctccgctttacaaacggaggctgttgtggtatattacagaataggctttttatgagcgaaagaggaggatggatgtatgcagccatacggagtaaaccaattaagaaaaatgtttttggagttctttgagagcaagggacatcttgcaatgaagagcttttctttagtaccacataatgataagagtcttctcctgattaattcaggaatggctccgctgaaaccatatttcacaggacaggagatcccgccgagaagaagagtgacaacatgtcagaaatgtattcgtacaggagatatcgagaatgtcggtaagacagcacgtcacggtacattctttgagatgcttggaaacttctcttttggagattatttcaagaatgaagcaatcgagtggtcctgggagttccttacagaagttgtgggacttgatccgaacagattatatccttcagtatacgaagatgatgatgaagcgttcgaaatctggaataagaagatgggaattccggcagagcgtatcttccgttttggtaaggaagataacttctgggagcacggttcaggcccatgtggtccatgttctgagatctactatgaccgtggagaaaaatacggatgtggaaaaccgggatgtacagtaggatgtgagtgcgaccgttacatggagatctggaataacgtattcagccagttcaacaatgacggacacggcaactatacagacctgatccagaagaacattgatacaggtatgggacttgagcgtcttgcctgtatcgtacaggatgtagattccatgtttgatattgatacaatgaaagcactgagagatcatgtatgtaacctctccggcaagcagtacggaatagatcatgagacagatgtttctctgcgtgttgttacagaccatattcgttccgtaacatttatggtttctgatggtatcttaccttctaacagcggtcgtggatatgttctccgccgtctgttaagacgtgcatgccgtcacggaaagctgctcggaattgacggagcattccttgtaaagcttgcaacaactgtaattgaaggttccaaggatggatatccggagctggaagagaagaaagagtttatctttaatgtaattgcgaaagaagaagcgaacttcaataagacaatcgatcagggacttgcaatccttgcagatatggaaactgagatggagaagaatggagagaaagttctttccggagagaatgcatttaagctttatgatacttatggattcccaatcgacctgacaagtgagatcctggaagaaaaggggctgacttatgacgaggaaggattcaagaaagcacaggaagaacagcgtgcgaaatcagaaggaacattcggaactcattcttatacaggaaaagaagtttctgtatacgatcagctggatgcagcacttgagacagaatttgtcggatatgacaatctgacatttgattctaaggttacagctcttacaacagagacagaagttgttgatgcactttctgatggagaaaagggaacaatcatcgttgagcagactccattctatgcaacaatgggtggacaggaagctgataaaggtgtgattcgtacagccgatggagagtttgttgtagaagattgtattcaccttgcaggaacaaaggttggacatgtaggacatgttgtaaaaggaatgatcaagattggtgatgcggtaactcttgaagttgacgcaaagaaccgtgcacttacagaaagaaaccacagtgcaacacatctgcttcagaaagcacttcgtacagtacttggaagccatgtagagcaggcaggatcttttgtaaatgcagacagacttcgtttcgactttacacatttctcagcagtaacacctgaggaactgaagaaggttgaagaaattgtgaatgagcagatcacaaatgccctcgcagttgtgacaaagaaccttccaatcgaggaagcaagaaagacaggagcacaggctctgtttggtgagaaatacggtgatgttgtacgtgtcgtagatatgagcggattctccgttgaattctgtggtggtacacatgttaagaatacatcagagatcacagcactgaagattatttctgagagtggtgtagcagcaggtgttcgtcgtattgaagccctgacatctgaaggacttatgaactactatgctgagatggagcgtcttctcaaagaagcagcacagcttgtaaaagcaactccggagaatcttgcagagaagatcacacatcttcaggcagagaacaagtctctgaagggagaagttgagagtcttaagagcaagatggctcagagcgcagcaggagacatccttgaccaggtgaaagaagtaaaaggtgtgaagcttcttgcagcacagcttgacggtgttgatatgaatggacttcgtgaccttggagaccagctcaaagagaagcttggcgaaggtgtggttgtacttgcatcaggaaatgacggaaaagtaagcctgatggctacagcaacagacggagcaatgaagcagggagcacatgccggaaatcttgtgaaagcaatcgcaggtcttgttggcggaggcggcggtggtcgtccgaacatggctcaggcaggtggaaagaacccagcaggaatcccggatgcacttgcaaaagcagaagaagcactggctgatcagattaaataaagtcattgtaaagagaatctgtctgtggcagattctcttttgggtagaagcgagaagaaagtataaaaaaatcggtaaaaatcataaaaagcagttgacgttttgaaaaaatatgttataataatatccagtgcaataaatatacccgaacagtcgtatgatgcacaatacaaggctggaggggaggttaggtgtgagactatgtcaaatgtaatcgttaaagaaaacgaaacgttagatagcgccttacgcagattcaagagaaactgtgcaaaggctggtattcagcaggagattcgtaagagagagcactacgagaaaccaagcgttagacgtaaaaagaaatctgaagctgctagaaaacgtaaatataactaatatgtgcaaatggacagagtactggaaacagtactctgttttttgatattcgtacagagtcaggcggccatagatagacaaagaggcgttatgcttgcataaaagcctctttgtctatctatggctatgtggcggatacgccacagcgataaaaagcgaagcattttagagctgcctggttcaaaaagggaaatgtgtaggaacaccggaaaggagcgctatacttgcataaaaaccaccattttcctatctgtttactcgacatataaccttaaatatgctgaaaattgcaatttgatacattagttcatgcagttttatcaacttaaagtgataaaactttaaaataatgcaattaatgattgacaatctttcatttagcttataaaataaacgagtagacaacggtgtctggggtaacagattgcttgtcagtctgtttttcttgttttagaaaagacattagttgacgaaagatacaatagtatcagggagatacgaatcccaatctatttattctaggaggtaattaagatgtcatacgttgatgaagtgattgatttagttgtaaagaagaatcctgctgagccggaattccatcaggcagtaaaagaggtactggagtctcttcgtgttgtgattgaagcaaatgaagaaaaattccgtaaagaagctcttcttgagagactggtagagcctgagagacagattaagttccgtgtaccgtgggtagatgacaagggtcaggtacaggttaacacaggataccgtgtacagttcagcagtgcgattggaccatacaagggaggtcttcgtcttcatccatctgtaaaccttggtattatcaaattcctcggttttgagcagattttcaaaaactcccttacaggacttccaatcggtggaggtaaaggtggatctgatttcgatcctaagggaaaatctgacagagaagttatggcattctgccagagctttatgacagaactttgcaaatatattggtgctgatactgatgttccagcaggagatattggtacaggcgcaagagagatcggatatatgttcggacagtacaagagaatccgtggagtatatgaaggagttcttacaggaaaaggactttcctatggtggatctcttgctcgtacagaggctacaggatatggtcttctgtatctgacagacgaacttctgaaactcaatggtattgagcttgcaggtaagacagttgcagtttctggtgcaggtaacgttgcaatttacgcaactgagaaagcacaggaactcggagctaaggttgttacagtaagtgattctacaggatgggtatacgatccagaaggaatcgatgttgcagctcttaaagaaatcaaagaagttaaccgtgcaagacttacagagtacaagaagtaccgtccgaattcagagtaccatgaaggaagaggagtatggaatgttaaagttgacatcgctcttccatgtgctacacagaatgagcttcaccttgaagatgcaaaagcacttgttgcaaacggatgtattgcagtatgtgaaggtgctaacatgcctacaactctcgaagctacagagtatctgcaggagaatggtgttatctttgcacctggtaaagcagctaacgccggtggtgttgctacatctgcacttgagatgtctcagaacagcgaacgtctgagctggacattcgaagaagtagatgctaaacttaaaaacatcatggttaacatctgccacaacatggttgatgcagctgagagatacggattcaagggcaactacgttgtaggtgctaacattgccggatttgagaaggttgtagatgctatgacagctcagggaatcgtttaggatttaagaaaatagattgagattttcatttgatcgattgatagaatagaaaggataccttatggatagaatgtctgtaaggtatcctttttatatattaggaaagtgctttcctaattgcaaaaaacgctccgcgatcttttaatgttaaaatcctgaaaatatttcctaaaaagaaaataaagtttattgacattatcaggaaaaatgagtatagtttattttaataaaagggagtaactggcgctttgagtagcgtttgcgagtcgtcaatacgatggaagaagtccatccggatcgtgatgaaatggtgagacttttattgcatgcaagaagcggtgcaataattgtctctttttttattcgcactgcagattaatcaggattatgggtcgcacatcgtgtgaatagtaaccaataatcagttaggaggaatggcagtgaaagcatattatcaattatcgggagaagaagttttaagagaagtgaatggctcggaagaaccattaacaaaagaacagatcagtgaaaatcaaaggaaatacggcccgaatgaactgactgaaggaaaaaagaagacaacatttcagatttttttggagcaatataaggattttctggtgatcatccttattatagcagcgatcgcatcaggatttatgggagatattgagagcgcagctgttattgttatcgtgatcacaatgaatgcaattctgggaactgtgcagacagtaaaggcagagtcatctctggcaagtctgaagaaattatccggtccggaagcaaaagttcttcgtgatggagtggttgtcccgattccgtcttcagaagttactgttggagacattattatgttagaggcgggagactatattcctgcagatggacgtattctggaatgtgcaagcatgaaggttgacgaaagtgcattgacgggagagagtcttggtgttgagaagacgacagatgtgattgaacaggacgaagttcctcttggagaccgtattaatatggtatattctggaagctttctcacgtatggaagaggttcttttgtagttacagagattggaatgaatacagaagttggtaaaattgcaagtcttctgaagacgacatctgagaagaagactccattgcaggtgaacctggatcagtttggacagaaattatccattttaattcttgtattctgtgcgattttgtttggaatcagtgttttccgtggtgagaatattggaaatgcatttctttttgcagttgctcttgccgttgcagcaattccggaggcgttaagttcaatcgttacgattgttctttcttttggaacgcagaaaatggcgaaagaacatgcaattgttcgaaaactacaggcagtagaaggactgggaagtgtatccattatctgttcagataaaactggaaccctgacacagaataagatgacagtagagcattattatgtagatggccagagcatttccgcagacaagatcgatctccgggatccgtctcagagcagactccttatcagcagtattctttgtaatgactctacgaatattgatggtgtagagatcggagacccgacagagacagcactgattaatttaggaagcagtcttggtcttgacccggaagaagtcagagtaaagtatccaagagaaagtgagaatccattcgatagcgaccgtaagatgatggcaacaaagcattcattaaacggagtgccaacgatgattgtcaaaggagcagttgatgttcttttgaaccggacagactgggttgagatgaaaggggagactcatgagatcacagaagagacaagaagagtaatcgaagagcagaatcagaaatactcaagagagggattacgagttcttgcatttgcttataaagaagtatcagatgagacggaacttacgctggaggatgaagatcatctgatattcctggggctgatcgcaatgatggatccgccgagagaagagtcaagagctgctgtagaagagtgtaaatgtgcaggaatccgtccgattatgattacaggagatcataaggtgacagctgctgccattgcaaagagaattggaattcttgaaaatgaatccgaagcctgtgagggtgcagagattgacaaaatgtccgatgaagaactgaaagactttgtggaagggatttctgtttacgccagagtttctcctgaacacaagatccgtattgtgcgtgcatggcaggaaaaaggaaacattgtatccatgacaggagatggtgtgaatgacgctccggcactgaaacaggcagacataggagtggcgatgggaattaccggaagcgaagtgtcaaaagacgctgcagcaatggttttgacagatgacaattttgcgactattattaaagcagtagagaatggaagaaatatatatcgcaatattaaagcatccattcagtttctgctttcgggaaattttggagcaatcctggcagtgctttatgcttcactgatggcacttccggtaccgttcgcgccggttcatctgttgttcattaatctgctgacagacagtcttccggcaattgctcttggattggaaccacattcgaaaaatgtgatgaaagaaaagccacgaccgataaatgaatccattttaacgaaagactttttgatcaatatcggactggaaggattatcaatctgtaccatggtcatgattgcatttacaattggatacaaagacggtaatgcactacttgcaagtacaatggcatttgcaacactttgctgttcaagattgttccatgggtttaactgtaaatcaaatcgtccggttgtatttacaaaaagagtctttaataacatttatctgatcggtgcttttgtaattggaatgattctgatcacgcttgttgtgactgttcctggactgcataacatctttaaagtgcagacactgacattatcgcagttacttactgtgtatggtcttgcagcattgaatcttccgattatacagatgataaaggcagttcgtgcaaaatttagaaaataggaggaacaacagtatgaagaaagttgagaaaccaaagaagccattaatcttttactatttgattgctttgattattctcgtgcttcttaacacatttctttttccgaatattctaggaaagaataaggtgaaagaagtcgattatggaacctttcttactatggtcgagggaaaagaagtatcaaaagtagagttgaatggagacactatttattttacagataatagcgaggaaccgaaatattatgagacaacaacgtttgatgatccaaatctggtaaatcgtctggaagatgcgggatgtgaattcggaagagtcgcacagcaggagatgaatccgcttcttagctttttccttgtatggattttaccacttttgatcttctgggcattaggacagtggcttgcaaagaagatgatggccaagatgggtggaggtgcagcaggaaatccgttcatgcagttcggaaagagcaatgcgaagatttatgtggaatctacaacaggaatcactttccaggatgtagccggagaagatgaagcgaaggaactgctgacagagattgtggattttcttcataacccgcagaaatatacggagatcggtgcagtatgtccgaaaggagcacttcttgtaggacctccgggaaccggtaaaactttgcttgcaaaagcagttgcaggagaggcaaatgtaccatttttctcaatctctggttcagaatttgtagagatgtttgttggcatgggagcttctaaagtacgtgatcttttcaaacaggcgaatgaaaaagcaccttgtattgtatttattgatgagattgatacaatcggtaaaaagagagataatgcaggatatggtggaaatgatgagcgtgagcagacattgaaccagttgctgacagagatggatggattcgatgcatctaagggtgttgtgatccttgctgcgacgaaccgaccggacagccttgatccggcacttctccgtccgggaagatttgaccgccgtattccggtggaacttccggatcttaaagggcgtgaagagattctgaaagttcacgcgaagaaagtaagacttggagatgacattgactttaatgcaatcgcaagagctgcatcaggagcatcaggagcagagcttgcaaatatggtaaatgaagcggcactgcgcgcagtcagagagaatcgtaaatatgtaacgcaggcagatcttgaagaaagtattgaaactgttatcgctggatatcagaagaagaatcaggtactttcttccaaggaaaaattaattgtttcttatcatgaaatcggtcatgcgttggtagcagcattacagacgaattcagcaccggttacaaagatcacgatcattccgcgtacatcaggtgccttgggatatacaatgcaggttgaatcagaagaacggaatctgatgacacaggaagagctgatcaacaagatcgcgacactgaccggaggaagatgcgcagaaaaactgatttttaattctatcacaacaggcgcatcgaatgatatcgagcaggcaacaaagcttgcaagagcaatgatcacgcgttatggaatgagtgaccggtttggtatggttgctcttgagacgcagaacaatccatatctgggaggagacagcagtttaagttgttccccacagacagcagcagatattgatcagatggttgtagataccgtaaaacacggatatgatacagcgatggaacttttggagaaaaaccagaagaaacttcatgagcttgcaaaatacctgtatgagaaagaaacaattacaggagaagaatttatgcagattttgacgagaacggagacgttggaagaagcagaagggaagtaacagatggcaagaagcagaaacaagaaaacagagattgaagaagaaatagagaagcggataccgacaacccgttacaatccggattataaagtcggattgacagcacagcaggtgcaggaacacagacttcatggctgggtaaacagggccgtcgatcctccgtcgaagacaacgaaagagattatacatgagaatgtatttacttactttaacttaatctttcttgttctggctattttgttatgtctggttggatccttccgggatctgacctttcttccggttattattgcaaatacgttgatcggtattatacaggaagtgcgtgccaaaaaagtgctggataatctgaccatgctaaatgcaccgaaagcgactgtagtgcgagatggtaaaagatcgttgattgatgcagaagagttggtagttgatgatattgtcatatttaaagccggcgcgcaggtatgtgcagatgcacaggtttgtgcaggtgaagtacaggtgaatgaatctctgctgacaggcgagtctgatgagattacaaaacatgccggagatcagctgatgtcaggaagttttattatttccggtcaatgtcatgcaagacttgataaagttggtgaagattcttatatttcaaagcttacactggaagcaaaagaaatgcagaatggtgagcagtcagagatgatccgctcgctggataaattggttaaatgcgtcggtgtggcaatcattccgattggaatcatactcgttgcacagtctctggtattccagaatgcatcattccattcaagtgttacgtcaatggtagcggctgtgatcggaatgattccggagggactttaccttcttgcaagcgttgcacttgctgtcagttcaatccggcttgcacagcagaaagtattgcttcatgatatgaaatgtattgagacacttgcgcgtgttgatgtactttgtgtagataagactggtacgatcacagaaaatacgatgaaagtacaggaacttattccaacggagcagtacgatacggaaaagatgggatctcttcgtcttatggtcggagattttgtttcagctatgacaaacgataatatcacaatggctgcaatgaaagaatattttacacattcttcaggcgcaaaagcaatttccaagacaggattttcatctgcgacaaagtacagcagtgctacatttgaagataagacatatgttcttggagcgccggaatttgtacttctggatgattacgagcaacataaggaaaaaatcacagagcttgcatctacaggtgcccgtgttcttgtatttggtacttatgcagcggagattgatggaaaagcactgacagagccggtaacaccgttgggctatatcttacttgcgaatccaatccgtgaggcggcaaaagaaacattccagtactttgcagagcagggagttgaagtgaaagttatttccggagataatccggttacagtttccaaagttgcaaaaacagcaggtattaaaaatgctgagaattatgtggatgcatcaagtcttgagacagaagaagatattaagaaagcgattcttgagaagacagtgtttggacgtgtaactccaaaccagaaacgacagtttgttcaggcacttaaagaggctgggaaaacagttgctatgacaggagacggagtaaatgatgtccttgctttgaaggatgcagactgcagtattgcaatggcatcaggaagcgaggcagcggcacaggcttctcaaatcgtacttctggagtcagatttctcttgtatgccacaggttgtattagaaggaagaagagtagtcaataatatccagcgttcggcgagcctgttcctggttaagaatatattctctttcctgctgagtcttttctcggtagtatttatgtttacttatccactggaaccatcacaggtatcattgatcagtatgtttacaatcggtattccggcgttcttccttgcacttgagccgaacaagaatatcattaaaggacatttcctgacgaacgtattcctgaaagcactcccggcagcacttacagatgcattggcggttggggcactggttgtctttggaaagacatttggagtaggagagcaggatatctcaacagcagcaacgatgcttctggcaattgtaggatttatgatcctctataagatcagtgcaccgatgaataagcttcgtgcaggaattcttggcggatgtattgcaggcttattattctgtagtatttatttgaatcagctgtttgcgattagaggaatgacaacaaagtgtatcatgctttttgttgtatttgcgatcgcaacagagccggtacttcgttatcttacgattcttcttggaaaaggaagattctattacagacgtttgcgcggaaaaacgccgttagaggaagaagcataatgtgcagtgaaaaataaaaaacaaatgtaattattcagaacggaaataagataaaaatcaagcggcagcagggaattattaatccctactgtcgcttgattctgctttactttttacattacattcttatagtttgcaatcgattaagttgattatgtagctggtcaattattctgtataaagaatcaatcaaagaaagtttcatgcagtttacgtactgcaagatctgcataggcttcatcgatcagagcagtgatgcgaatctcagatgtagtaaccatctctgtgttgacatcaatacttgcgagtgcaccgaacatctttgcagcaacacctgaatgagaacgaataccggcaccaatgacagaaactttggcaacattttcatcagaatccagtttcttaatgccaagatagtctttgctttcatttaacagatccaaagcacggagcatgtccgattttgcaacagtgaaggatacagattttgtaccgtctttaccaagagactggatcatgacgtcaatgttcagtttattcttatctaaaagatttaaaagacggaatgtgctactaggctcgttcccgagaccggcaacacggattttggctacatttttatcggctgccacaccactgattaacattttttccattttcgttttctcccttacaattgttcctgaattgtggtttaagctagaacataccagaagttctacaccgtattttttcgcaatttctacacatctgctgtgaaggactttcgcaccaagagaggccatctcaagcatctcatcataagtgatctctgtcattttatgagcgtttggaacaacgcgtggatcggcggtatatactccgtctacatctgtgtaaatttcacagacatcggcatggagttcagcagcaagagcaaccgctgttgtgtcagagccgccgcggccaagagttgtgatatcttcatacttattgattccctggaatccggttacgatgacgatcttgttcgcatcaagctctttacggatacgctcggaatcaattctcttgaatcgcgcattttgataatttgaagttgtatgcattggaacctgccatgcattcagtgacactgcactgacgcccatggaaatcagagtcattgccattaaggatacagaaacctgttcaccggttgtaagaagcatatctaattccctgcgggaaggctgctctgtgatctgttttgctgttgcgatcagattatctgtagtctttcccatagcagacaggacaacaacaacctggctgccttcgcgctgctttgcgatacagcggtttgctacgttgcggatgtgctccaaatcggccacggagcttccgccaaatttcattactgtcagcatatttttatctcccttatattctctgacgaatctgtgttgctggtaatatatagtgtgagcagtaacagcaaaagagtcagagaatttttagttactgttcatagtgggtgtgagcagcaactttatacgtagataagtatagcaaaaaaaagaaataaaatacagaagaacatttgttctatatatacttgcagtggcataaagtgtgtgttatactgcaaattaacagaaagcaggtgaataaagatgactccaaaagaagtaataccaaaagtgcagcaggacctttttacaatgcaggatctaaaatatcgggattttcacgcaaaactgatgccaacagtagagaaagaatcagtgataggagtgagagtccctgtacttcgaacttatgcaaagaaattcgggaagacagaagaggcgaagcagtttcttaagatcctgccacatcaatattatgaagagaataatctgcaggggcttctgatcgagcagattaaagattatgaactctgtatagaagaactggagcgctttctgccccatatagataactgggcaacctgtgatcttctggccgtcagaacagtgaagaatcatctgaattcttatatcaaaaagatagatcgatggctggaatcagagcatatatatacgatccgatttggaatcaatatgctgatgcgctattatctggaagaagaatttaagttagaatatccggggaaggttgccgcaatccgttcagaagagtattatgtaaatatggccagggcatggtatttcgcaacagcacttgccaaaaagtatgatcaggttcttccatttctagaagaacagaagatggacgtatggacacataataagacaatccagaaggcaatcgaaagctatcggatcacgccggaacaaaaagagtatctgagaactttgaagataagacaataatgtttgtaggaggagaaataatggcagaaaaattaagagtacttatgattaatggaagtccaagagcaaacggaaatactagtgtaggactaaaagaaatggaaaagatttttcaggaaaatggagtagaagtagagacagtagttgttggaaataaacctgtccgtggatgtgttgcctgtggaggatgtgcttccaagcaaaaatgtgtttatgatgatgtagttaacgaactggctttgaaattcgagaaagcagacggactggttatcgcaagtccagtctattatgcatccgcaaatgcaacattgatcgcctgtcttgaccgcctgttctacagcacaccatttgataagactatgaaagtaggagcaagtgttgtctgtgcaaggcgcggtggatgttcagcaacatttgacgagttaaacaaatactttacaatttctggaatgccagttgcttccagtcagtattggaatagtattcatggaagaatatcaggagaagcagagcaggatggagaaggaaagcagactatgagagtcctcgccagaaacatgacatttcttatgaagagtattgccttgggtaaagaacagtttggacttccggagaaagaagaacgaattgcaacacattttattaggtaaagaagaggagaattaaaatgagttatgtatcttttaatgatgtgatagaattaaatggaattcttaaagataaaggtctgaatttccgaattcatctcagggacacttgtggaaggcaatccttctggatcgaaccacttggtaattgtgcctgcgaaggacgatatgatgagatgtatcaggtggtagaagagtatctcgaaggaaaaggattttccgtgcagtacgatgatcagaagatgaattttgtggtataaatttgtatttagcaataagaatattggctggttcaaaatttaaatgaatgaagaagggcgtgtttggacggtctcttgcaacgatatgcagggcccgttccctcagccttttgagggattgtaacaaagaagcgagatatgcaccgtgtgtggtttgtatctcgcttcttctaacaatccgcgcaaaatgtcttcgtacactcttacgccaaatgcatatcttatgcaagagtccatccaaacactcaggttcatcagatcagaaatgatttaaatacagattattcttatcgaaatgcaaatcagaagggatatgaaaagggaacgctattgactaaaatttacaaattggcacaagttgtgtcatatagtcgatagcgttcccttttttacttccgtccagaattctgtattcaagtgttgaattcgttccacagcaatcacttatgtgcaacaaatcaaaacttgtatgaagtctttcagattcgtcccgttaagcaaacacttctgtttggaataaagaagcgaggatggtgctacattgttgaggacacatgtaaggcaggagcgttccgaatacaccttgttcagtatgttagtaagagccagacaggcaccactcacggtaactgttctggctcttacgttacatactttcaaggggatgaggtagagcgggccggtgtccgatgcaatatagcatcatccttgcggccttattcaccaccaaatcctttgcttcaatatggagaatcagacagacaaatacaaatttatttcgacttcacttctctccacaattcgttatacagcgcctcattttcatctccgaggaaattaaacgtttcacagtttttcaactgatcaatatcagggaatgcaatcgtgctgtttctcatgtagtcatcctcgatcaatgcctgcccggcagagttagggatggagtaagtgatgtattcaaaattcatttttgcaatatccggtctacagaggaagttgatgaattcttctgcatgttccttattttctgcattttttggaataacccaggagtcaatccaaagattagaaccttccttaggaatcacgtaatcgagatttggattctcctgctggcagtagagtgcttcgccagaataaattactccgagagctgcttcatttccaatcattttatcacgtacctggtcgataacatatgcctgcacaagaggtttctgttcaatcagcagatttttggcagcctgaagttcatctaagtctgttgaatttaatgaatagcccaggtattttaaagcgacaccaaaggcatctcttacactgtcctgcataaggatgctatctttatatttttcatcccacagaacaccccagctgtcaattggctcatctaccattttcttgttataaaggattccgacagtcccccaaagataagggacagaatatttattatcaggatcaaatcctttggcaagatccatatatttctgatcgatatatttcaaatttgggatgttgtcataattaatctcttccaaaagattattctcaatcattctctgaatcatataatcagatggacatacgacatcgtatgcaatcgctcccgactgaatttttggatacatgatctcatttgtctcaaattcttcatatactacatcaataccggtttcttcttcaaacatatcaataacatcaggatcaatataatcaccccagttataaacaattacctggccttgtgaggagataacatcgttctttccataaataaaaccaccgatgataataagcacagccatagcaacaggtaccagacgttggaagaaaaatcttccaaatttttgtgcttttccgaaacgctttatttttactacttttttcttttcggcaggtgacatattgatcaggatcaaaagtaacagcactgtaacaaacataatggttgaaagtgcatacatttcaggcttgattcctttacggacttcactgtaaatcttggttgagagtgtatcaataccaggaccttttgtgaaatgcgtgatcacaaagtcatccagagacattgtaaaggaaagcaggaaaccggagaaaattccaggcataatatctggaagtactactttgaagaatgcataggccggagaagctccaaggtccagtgcagcttcataagttctacggttcgtctgttttaattttggcattacacttaagatgacataaggtatgttgaatgtaatatgtgccaaaaggattgttttgaatccaagtgtgaagcggaatgcaatgaagagaagcatcagggatactcctgttacgatatcggcattcagcatagggatgtttgtaactcccataaaaagggtacgcattcttgaattcattgcctgcatgccaagtgcggcacaagtaccgatcaatgttgcaatcagtgcagagagcaatgcaatgatcagtgttgtgtacaatgcattcataatctctttgttttggaaaagagacacataccattttccggtgaatccgccccatttggaacgtgttttagtattgttaaaggagaggaccatcaaagttacgatcggtgcatacagaataatgcagatcagtgccagatagatcttttttgctatagttttcattaaaatgctgtcccctccccgtttttatcatatttggcgatcacagccatacttgcgatgatgaagatcatcagcaccagggataaaccggaaccggtatgccagttgcttccctgtttgaattcctgctcgatcacgtttccaatcagaagaatcttgcttccaccgagaaggtcggaaataacaaaggtcgtcagcgcaggtacgaagaccatagtgataccactgataattccaggaatgctcaaaggaaagatgatctgtgtaaatgtctgaaattcattggctccaagatctcttgctgcgtaaatgacatctttatcaatctttgccaatacattataaatgggaagcaccataaaaggcaggaagttatataccatacctaatacaatagctcccggtgtattgatgatagactgctgtggcagatggaagaatgcaagaatgctgttgatcacaccatttttttcaagcagtgtctgccaggcgagtgtacgcagaagaaagttcatccacataggaagaataaaaatcagtacgataagacttgtctggttcatgtttttttcagataaaatcattgcaagaggatatgcaagaaccaggcagatcagtgtgctgaccagggaaagcagcagtgcaagtccgagtgctttcagattctcaggcgaagccatcattgcaatgttagaccaggtaaaagtcccttctttatctgtcagaccataataaaagatcatgagcagtgggataataataaatgacacggaccagaaaagataaggcccggcaagtaattttctattcttcaacagcaggtgcctcctcatcttcagattctggttttttcataatctggatgtcaaaaggatctactttgattccgacttcagttcctacagggaacatatctgtgctatgtacgagaagttcatagttgttggcaagaacttccatctcgtagtgaacgcccttaaagatcaagtttgttacaattccgtcaataacaccttctccaggtttgacaagatcaatatcttccggacggattacagcatcgaccggacggttatgaccaaatcctacgtctacacatttccagacagcaccgagcatacggacaactttgtcttcgagcatggttgcagcaataatattactgtctccgataaaatcagctacgaatgcattttgcggttcgttataaatatcttccggggtgccgatctgctggatgtatccctgattcataacgacaatcgtatcagacattgtaagagcttcttcctgatcgtgcgttacatagacaaatgtaattccaagttcattttttaatcggatcagctcatattgcatatcctggcgaagttttaaatccaatgcaccaagtggttcatcaagaagaagaacctttggttcatttacaatcgcacgtgcgattgcgattcgctgctgctgaccaccacttaaggagtcaggagaacgatccccgtatccttccagattgacaagctttaaggcataatgaatcttatcgcggatatagcctttagatttacctttgatcctcaatccgaaagcaatattttctgcaatggacatatgagagaagagggcatatttctggaatacggtattcagctgacgacggtttggcggaagactgttgatattttttccatcaaaaataatattgccggagtccggtgtctcaaagccaccgagaatacgtaatagtgtcgtttttccacatccactaggaccaaggagtgtgagaaattcgttctcacggatataaagatttaatttatccagaattacattttcgtcataggatttggtaatatctatgatatcgatcagtttattagacatttttatcctccgtatataattgttttatctgattcatccggctgactgcattacgcaagagcagatcagcgagagtgagtgcggtcattgcttccacaacaacaactgcgcgcggtacgatgattggatcatgacgtccgtgaatagacagttcgatttcttcgcctgaattagttacagtgtgctgcatctgagagatcgaaggtgttggcttgatcgcagctcttaagattaattgagaaccatcactcatgccacccaaagttccaccggaatgattcgaagttttcataacctctccttgttgcatgcagaaaggatcattgtttgtgcttccggtagaagaggcactctgaaagccatcgccgatttcgacaccttttacggctccgatagacatgattgcctgtgcaagtaaagcgtccagtttatcgaagaccggttcaccgagaccggctggaagatggtcaacacggcattcaatcagaccgccgcaggaatccatctgctccataagagtagaaacatattcagcagcctttttggcagcatttttattcggcagataaaaactgttatttgtaatctcagtaaaatcataatcagcttcatctacagtgacaggaccgatggattttgcataagttgtcagcacaatccctaattcgccaagtaattttgaagcaattgcaccggcagcaacacggccgatcgtctcacggccggaagaacgtccaccgccacggtaatcacggaaaccatatttctgatcaaagcagtaatctgcgtgtcccggacgataagatgtcgcaatattcccataatctctggaacgctgatcctgattccgcacgagaagagaaataggagttccggttgtagttccttcaaagactccggacagaatctcgacagagtcagattcattccgcttcgttgtatatttactctgtcccggtttgcggcgatctaaaaattgttgaatatcctgttcagataaagggatgccggcagggcatccatctataactacaccaactccgggaccgtgggactcgccccaggtagtgactcgaaataaagtaccaaatgttgaaccgctcataatatatctaaaactcctttcgtttgtatcaataggggatacaaaaagtgcgtataaaatgctcttttgtatatcatatatcattcttttccgtatcatacccccagatacgaaacatattgttgtgtttcataactgagggtacagtgcaattatataggaagaaagaggtgtacgcaagttaaaatgttatagaattcaacagaatttcaaaaataaattacaaaagtatttctaaaagatttcgttcgaattaacaattcaacatcggtttaatttgtgtgtatttcatgaaagtttggggtgtacattttggaaaaagcgtaatataatgaagtctgaatcaaaaagaagtattaatccaaaagacgagggtgagaattagaatgtctgaaaagaaagtagttagaagacgcaaagtaagaagaaagaaaaagcagaagacaattgacaagaagatctggatgattatcggtggtattattgctggccttgttattgtttatcttgcaatatcagccttttttatgagtcatttctatattaatacgcagattaacggaaagaacttttctggtaagaatgcggcggcggtagagaattatattaaaaatcaggtggcagattataaactgacaattgtagaacagaataatatgacagatgcaatcaaaggatcggatatttcacttgtatataaggaaaattcagatatagaggatgcactgaagaaacagaatgcatttttgtggccacaggcatttttctcaaaaagttcagctgaggtcacaattgaggttggatatgacgaagcagcattggagtcaaagattgaagccgtacaagccctgaatcaggagcagacagatccacagtctgcttatccaaagtatgatgggaacagttttgttgttgaacctgaagtttatggtacgaaagtagatgtggatacatttaaggcaaaagtgaaggatgcgatcacaaacttcaagagtgaattaaatatgatggatgagaagtgctatactatgccgaagtacacttcagagtctccggaagttcagaaagcctgtgatgcgatgaataattatctgaaagccagcatcacttataagatgacaaaccagaatgtggttgtaaacaaggatctgatttcaggctgggtaacatatgatgataatatgaatgcaacgcttgatgagtcaaaggtgaaagagtggcttcgtgaatttggaaagacttatgatacggttggaacgacaagaagtattacaactccgggaggaaaaacagtagacgtttcgggaggtacttacggctggtcagttgacgaggcagcagaactgactgcgcttgttgacagcattaagaaaggtgaggttgtcgagaaagaacctgcttatgcacagacggcagctacacatgacgcgcaggattggggaacgacttatctggaagtagatatcccggctcagcacatgtggtatgtggttaacggagctgtacaattagagacagacgttgttacaggacttcctacaccggagcgagagacaccgacaggagtttattcgatccttgagatgaagagggataaagttcttacaggaacaatagatccttcaacaggaaagccaatttatcagacgccggtagcatactggatgcgtgtgacctggacaggagtcggattccacgatgcgacatggaatccaagttttggcggaagccgttatcagacgaatggttctcatggatgtatcaatatgccattagaccaggcggcaagtctttacggaatgcttagtatgggaacacctgttataatacataattaaaggaaatgcaaagataaatataacctgccataactattggcaggctttgatagtctgaaaatcaaaaagaaaagaagaggaaaaaagcttatgtatgaacttttaaagaaggacgggcgtgcgaaaagaggacgctttacaacagttcacggagtaattgaaactccggtttttatgaatgttggaacagcagcagcaatcaaaggagcagtatctacagatgatctgagagggattaagacgcaggtggagttgtctaatacatatcatcttcatgttcgtccgggagatgaagttgtgaagaaactcggaggacttcataaatttatgaactgggataaaccgattctgacagattccggcggatttcaggtattttcccttgcaaagttgagaaagatcaaggaagaaggagttcattttaattcacatattgatggtcataagatatttatgggaccggaacagagcatgcagattcagtctaatcttgcatccacgattgcgatggcatttgatgagtgcccgtccagtgtggcagacagaaagtatatgacgaattctgtagagcgtacgacgcgctggctgaagcgctgtaaggatgagatggcaagactgaattctctgccggatacgatcaatccacatcagatgctgtttggaattaatcagggtggaatttatgaggatatccgaattgcacatgcacagcagatcgcagaactgaatctggatggttatgcagtgggtggacttgcagtaggagagagccacgaagagatgtaccgtattcttgatgcagtggttccgcatcttccggaaaacaagccgacttatctgatgggtgttggtacaccggctaatattctggaggcagtagatcgaggagtggatttctttgactgtgtatatccgtcaagaaacggacgccatgggcatgtatatacaaatcatggaaagatgaatctgtttaatgccaagtatgaactggatgaccgtccgatcgaggaaggatgtaactgtccggcatgtagaagctacagcagagcgtacatcagacatctgttgaaagcaaaagagatgctcggaatgcgtctgtgtgtacttcataatctgtatttctataacacaatgatggaagaaatccgtgatgcgattgatgcaggggaattccaggcatacaagaagagaaaattggaaggcatggaacagaaatagtgtttctgctctaattttatagaaaatgtataaaaataaacttaaatatacatggaatattagaaaaacacttgaattagaagctgtttttgtgtatagtagatttattgtctattagtacttaaaaagtactggacagataggtttaagaaatagtcaggaggaaatttcaatgggaacagtaggtattattgttgtttatgctgttatcctcggtggtatgtggtttcttctgatgcgtcctcagaaaaaggagcagaagagaatccaggcaatgctcgctgatatggagattggagatacagcgcttactacaagtggattttatggtgttatcatcgatattactgatgatgacgtgattgttgagttcggtaataataagaattgccgtattcctatgcagaaggctgcgatcgctcagattgagaagccaggtgctgaataagaggaaaaatgagaccggaaggagtgtgactctttctggtcttttattttacgcgagcaacgagtcaaagtccgtgtttgcacgagaccttggcgactgccgtgataacttgagaaactcgcagagcgtgtttctcataggtttagacagaatgtgcctgaaaaagtacaatttttgataaaaatacagagcgccctctatttttcactcgaaatacttgaaacagtgaaaaaaatgcggtatgataaaaaaagatttttacattttggaaggatgagttagatatggaaatgaaaattggagtaatcaaaggagatggaatcggtcctgagatcgtagaggaggcaatgaaggtactggatcagacagcgaaagtttatggtcattctatttcctacacgcagcttctgatgggaggagcatcaattgatgtgaacggggtgccgcttacagaagagactcttcagctggcaaaagacagtgatgcagttcttatgggttccattggtggtgatgcgaagacttctccatggtatcagctcgaaccatcaaaacgtccggaagcaggtttgttacagcttagaaagggacttaatctttttgcaaacttaagaccggcagttctctacgatgaactgaaaggtgcgtgtccattgaagaaagagatcgcggacagaggatttgatctaatgatcatgcgtgaattgacaggtggtctttatttcggaaaacgaagcacagaagagattgatggtgtccttaccgcaaaagacgaacttacttataatgaaaatgaaatccgcagaattgcaaaacgtggttttgatattgcaatgaagagaaacaagaaggtcacaagtgttgacaaagcgaatgtacttgactcttccagactttggagaaaagttgttgaggaagtagcgaaggactatccggaagttacattagaacatatgcttgttgacaactgtgcaatgcagcttgtgaaggatccggcacagtttgacgttgtcctgacagagaacatgtttggagatattttatccgatgaagcaagtatggtgacaggttctatcggaatgcttgcaagtgcaagtctgaacgatacaaaattcggtctgtatgaaccaagtggcggttcagcaccggatatcgccggaaagggaatcgcaaacccgatcgcaacaattctttcagcagcaatgatgctgagattttcatttgatcttgataaagaggcagatgcgattgaaaatgctgttgcagcagtattaaaagacggataccgtacgatcgacattatgtctgaaggaaaagaacagatcggaacagcccagatgggagataagatctgcgaatatattaagtaattagcagttgttacagaaagagaggattttaaaatgagaagtgatacagttaaaaaaggaattcagcaggcaccacatcgttctctgtttaatgcactgggacttacagaagaggaattagatcgtccactgatcggtgttgtaagttcttataatgagattgtaccggggcacatgaatctggataagatcacagaagcagttaaacttggcgtggcaatggccggaggaacaccaatcatggttcctgctattgctgtctgtgatggtattgctatgggacatatcggtatgaaatattctctcgtaacaagagatctgatcgcagattctacagaagctcttgctatggcacatcagtttgacggacttgtaatgatcccaaactgtgacaagaatgtaccgggacttctgatggcagctgcccgtgtgaatgtaccgacagtatttgtaagcggcggaccgatgcttgcaggacatgtaaagggaagtaaaacaagtctttccagtatgtttgaggcagtaggttcttatgcagccggaaagatgaatgacgaagacatttgcgaatttgagaataaagcatgtccgacttgcggatcctgttccggtatgtatacggcaaacagtatgaactgtctgacagaggctcttggtatggggctgaaaggaaatggaacaatcccagctgtttattctgcaagaatccagcttgcaaagcatgcaggtatgcaggtgatggagcttgtaagaaagaatatccgcccgagagatattatgacagaagatgcaatcctcaatgcacttacagttgatatggcacttggatgctctacaaacagcatgcttcaccttccggcaatcgcacatgagattggtatggatttcgagattgattttgcaaatgcgatcagcgagaagactccaaacctttgtcatcttgcaccggcaggtcatacttatattgaagatctgaacgaagcaggtggagtttatgcagttatgaatgagctgaataagaagggacttcttcacacagactgcatgactgtaacaggaaagacagtaggagagaatattgccggatgtgagaataagaatccggaagttatccgtccaatcgacaacccatatactcagacaggcggacttgctgtattgaaaggaaatcttgcaccggacggaagtgttgtaaaacgttctgcagtatgtgatgagatgcttgtacatgaaggaccggcaagaatcttcgagagtgatgaagaagcgacagaagcaatcaagacaggaaagatcaatcctggagatgttattgtaatccgttacgagggaccaaaaggcggccctggaatgagagagatgctcaatcctacatctgcgattgcaggatacggacttgggtctacagtagctcttatcacagatggaagattcagcggagcatccagaggtgcttctatcggacacgtatcaccggaggcagcagttggcggaccgatcgcactggtagaagagggagatattatcaagatcaatattccggaactgaaattagagctggatgtatcggatgaagaactggcagcaagaaaagcaaaatggcagccaagagaacctaaggttaagacaggatacctcgcaagatatgcttctatggtaacatcaggtaaccgcggagcaattctcgaagtaccgaaggcaaaataaaataaagaaccaggaggagagtacgtcatgcagttaaatggagcagaaatcgtgatcgaatgtctgaaagaacaaggcgttgacactgtatttggctatccgggtggagcaattttaaatgtatatgatgaactttataaacaccgtgatgagatccgtcacatcctgacttctcatgagcagggggcagcacatgcggctgacggatatgcgagagctacaggaaaagtgggggtctgccttgcaacaagcggaccgggcgcaaccaatcttgtaacaggaatcgcaacagcatatatggattctataccgattgttgcaattacatgtaatgtcggtgtcccattacttggaaaagacagttttcaggagatcgacattgctggagtaacaatgccaattacaaaatacagttatatcgttaaagatgtgacaaagcttgcagaaacaatcagaaaggcttttcgtattgctaagactggaagaccggggccggtgctgatcgatattccgaaggatgttactgcgaaagttacagagtatgagaaggaatatccaggtgtatatgaccgagaggtaatccattcagaagaagaggatctcaagaaagctgttgagatgatcaaagaagcgcagagaccatatattttcgtaggtggtggatctgttctttctgaggcaagtaaagaactttatgaatttgcacagaaggtagatgcaccggtaacagattctctgatggggaaaggagctttcccgggaactgatgagagatataccggaatgctcggaatgcatggaacaaaggcgtcgaactttggagtaagtgaatgcgatcttctgatcgtaacaggagcaagattcagtgaccgtgtaaccggaaatactgcaacatttgcaaaagacgcgaagattcttcagattgacattgatccggcagagatggataagaatgtcatgatcgatcttgggttagtaggtgatattaaagcagtcctgaagaaaataaatgagcatcttccacagcagtctcatccggaatggatgaataagattaaagattacaaggcgaaatatccattaacatatcataaggatgtacttacaggtccatttgcagtagaagaaatttatcgtcagacaaatggagaagcaattatcacaacagaagtcggacagcatcagatgtgggcagcacagtattataaatatacgaaaccaagaacacttttaacatcaggtggtcttggaacaatgggatatggtcttggagcagcaatcggtgcgaagacaggatgtccggataaaattgttgtaaatattgccggagacggatgtttccgtatgaatatgaatgagattgcaacagccgtaagacatgatgttccgattatccaggttgtagttaataaccatgtactcggtatggttcgtcaatggcaggatcttttctatgatgaaagatattctgcgacagttctccgtgatgcagttgactatgtgaagcttgcagaagcgatgggagcagtaggacttcgagctacaacacaggaggagtttaaagagtgctttgcgaaagcattgacatgtggaaaaccggttctgatcgattgtatgatcgactgtgatgataaggtatggcctatggttgcgccgggagcaccgatcagcgaagcatttgatgagcaggatctgaaagcaaaagaaaactaaaaataataagtttcagccacatagttgtatgactgataaataaaggaatattttatttttatgtgagaaaatctgtgaaaacggagtttctatagatacacaataacaggaggtaattaaaaatgagtagagtgtataatttttcagcgggaccggcggttctgccagaagaagtactgaaggaagcggcagcagagatgctggactacaagggaacaggaatgtctgttatggagatgagtcatcgttccaaagctttcgaggaaattatcacagaagctgagcaggatctcagagatctgatgaatattccggataactataaagtactgtttcttcagggtggagcgtcacagcagtttgctatgatccctatgaatctgatgaagaataaggttgctgattacattgtcacaggacagtgggctaagaaagcagctaaggaagcagaaaaatatggaaaggtaaatgttgttgcatcctcagcggataagacattttcatacattccagactgttccgatcttccgatttcagaagatgcagactacgtatatatctgtgaaaacaacactatttacggaacaaaatttaaaacactgccaaacacaaaaggaaaagatcttgtggcagatgtctcctcctgttttctttccgaacctgtagatgtaacaaaatatgcaatgatttatggtggagttcagaaaaatatcggacctgctggtgtagtgatcgcaatcatccgtgaagatctgatcacagaggatgttctcccgggaacacctacaatgcttacatataagacacatgcagatgcaaaatctctttataatacaccaccggcatacggaatctatatctgtggtaaagtcttcaaatggcttaagaagatgggcggacttgaagtaatgaaagaacgcaacgaaaagaaagcaaaagttctttatgatttccttgatcagagcaaactgttcaaaggaactgttgtcccggaagatcgttctcttatgaatgtaccattcgtgacaggcgatgcagatctggatgcaaaattcgttaaggaagcaaaagaagctggatttgagaatctgaaaggacatagaactgtaggtggaatgcgtgccagcatttacaacgcaatgccatatgagggtgttgttgcacttgtagactttatgaagaaatttgaagaggagaatctgtaagatgtttaaatatcattgcctgaatccaatttctgccgttggcatgaataagttggatgaaaattatgtaaagacagaaaatgcggatgaagctgacgtgattcttgtccgcagtgcaaaaatgcatgagatggaattcggaaagaacctgaaagcaatcgctcgtgcgggagccggagtgaataatattccgcttgataaatgtgcagaggaaggaattgttgtattcaatacacctggagcaaatgcgaatggtgtaaaagaacttgtgattgcaggaatgcttctcgcagccagagatgtcgttggtggaattcagtgggtacaggaattcgaggaagatggagatatcgcaaagattgctgagaagaagaaaaaagcatttgcaggaacagagctttccggaaagaaacttggtgtgatcggacttggagcaatcggagttcttgttgcgaatgtagcaacacatcttggaatggaagtttatggatatgatccatatgtttccgtagattctgcatggagactttccagaagtatccatcacgcaacaacagtagatgaaatctataaagagtgcgattatatcacgatccatgtacctgcacttgacagtacaaagggaatgattgacaagaatgcaatcagtctgatgaaagagggcgttgtaattctgaacttcgccagagatgttcttgtaaatcaggaagatatcgttgatgcacttgtagcaggtaaagtacaccgttatgtaacagatttcccaacaaaggaaattgtaggtgtaaaaggcgcaattgtaattccgcatcttggagcatctacagaagagtcagaagacaactgtgcacagatggctgttgctgagatccgtgatttccttgagaacggaaatatcacacattccgttaattatccggattgtaacgtgggagtaaaagctggcggagacagaattacaattcttcaccgtaatgtgccgaatatgatcggtcagtttacaacacttcttgcacaggagaatcagaatatcgcacttatgacaaataagagcaagaaagagtatgcatacacagtaattgatgtagacggaagcgtatctgatgatgttgtaaacaaactggaatcaatcgcagatgtacttggtgtacgtgtgatcaaataaaaaataaatgaagtgtaatttggctaagctgattttgaaagctaatttataacgaaaagaacagggtggtttttctatgtgagagaccacctttttgtatacaataagttgataaataagatatggtacaaagcatataaaaatgaacagatagtatggagaagtattatgcaaaaatggatacattttaatacaatgatatcggcatgaaatcatcttgacaatatttgtataatcgtatacaatcatacaaaaagagaataggaggaaatcatggaagaatatcaggaccgttctctgggaggacgtgtttttaagagactccgtgaagatatcctcaaaggcagatacaaacaacaggatgaactcagagaggctaccatcgggaaagaactcggggtcagcagaactccagtaagggaagcgttaagacagcttgaattagaaggtcttgtgacgattgtaccgaataaaggtgcttatgttaccggaatcagccagaaggatatctgggatatctatcagatgcgtaagtatctggaaggaatgtgcgccagatgggcggcggaacatattacagaagaccagttagaagaattagaagagactattttactttcagaatttcagatgaagaaagaaaatggatacaataaagaacaagtaacaggattagacggaagatttcatacgatattatatgaggcttccggaagcaggatgctgtgtcatgttcttacagattttcaccgatatgttcaaatggcaaggaagtcctcgatcaatgtgaaggcaagagccgagaagtcaattgaggagcataaagcaattcttcaggcaatcagggacagaaacccggatctggcagaacagcttgcaaaggaacatattgttcatgtcatgcagaacctaaagaaaatagaagaaaaacataatcaggaggaagcaaaagatggaaaaaattaagatgacaacaccactggtagagatggatggagatgagatgacaagaattctctggaagatgatcaaggataatcttcttgagccatatattgatctcaagacagaatattatgatcttggcctggaacacagaaacgagacagatgaccaggtaacagttgattccgcactcgcaacaaagaaatacaaagttgccgtaaaatgtgcaacaatcactccgaatgcagcacgtatggatgagtatgatctgaaagaaatgtggaagagcccgaacggaacaatccgtgcgatccttgatggaacagtgttccgcgctccaatcgttgtaaaaggaattgagccatgtgtaaagaactggaagaaaccaattacaattgcaagacatgcttatggagatgtatataaaggatccgagatgaagattccgggggcgggaaaggttgaacttgtatacacagcagaagatggaagccagacaaaagaactggttcatgagtttgacggaccgggaatcgtacagggaatgcataatatcaataaatccatcgaaagctttgcaagaagctgcttttcttacgctttggatacaaaacaggatctgtggtttgcaacaaaggatacaatttctaagaaatatgatcatacattcaaagatatcttccaggaaatctttgatgtagaatatgctgatcagttcaaagaggcaggaattgagtatttctacacactgatcgatgatgctgttgcccgtgttatgaaatcagaaggtggatatatctgggcatgtaagaactacgatggagatgtaatgagcgacatggtatcttccgcattcggttcacttgctatgatgacatccgtacttgtttctccggacggatattatgaatatgaagctgctcatggaactgtacagcgtcactattataagcacctgaaaggtgaagagacatctacaaactcagttgcaacaatcttcgcatggacaggagctctcagaaaacgcggcgagctggatggaaacaaagatctgatggacttcgcagataaacttgagaaagcaacaatcgacacaatcgaagcaggagagatgacaaaagacctcgctttgatcacaacgatcgagaatccgacagtactcaatagtgaggagtttattaaagcaatagcgaagagactgtaatttatcgagggaatttatacaatgggctaagtttttgacagaatggtcgcaagaatgggtctactattaccatgggcaccggcccgctctacctcatccctttgaaagtatgtaacataagagccagaacagttaccgtgtgtggtgcctgttctggctcttattaacatactgaacaaagtgtattcggaacgctcctgccttatatgtgcccctggcaacagtagacccgttcttgcttgcgtagttcaaaattaaactttctcctacaaatacaaaattcactcgaaaatacagaaactaaagtcaaaagatcaagaaatcttcatcgacaaagctccaccttctcccggctgttaattctgtatttgtcttctggattcgctttgtttgggataaaaacttctcctttagatagcgtagtgatgtgggggactttattgttgaggacacatataaggcaggagcgttccgaatacactttgcagaatctgttaggaaaagacagacacgaacctctcacggtgagtgttctgacttttctgttacagattgtcaaagggatgaggtagagcgggccggtgtctgatgcaataaagcccccacatcacggatataaaatataaaaaagtatttaccagctggaagaatccaagctcgacaaaaacaatgtcctgtgaaaaaaatgtcaatttgcggaaaatatgaattgaaattttaatcggcctagtatataatacaataggcagaaattttggtttattttaaaattattttataagtatggagggctaaaatatgagctacaatgcaacagaaaactcagcaagcagacgaattgccacactgcttgatgagggaagctttgttgaaattggcggagctgttacagctagaagcacaactttcaacttgcaggagaaggcagctccttctgacggtgttatcactggatatggagtgattgacggtaacctggtttatgtatacagccaggatgctgacgttttgggtggagcactcggagagatgcatgcgaagaagatcgcaagaatctatgatatggctatgaagatgggagcaccggtgattggactgatcgactgtgcaggtctcagacttcaggaagctacagatgcacttgaggcatttggaagtctttatcacaaacaggcacttgcatcaggtgtgattccgcaggttacagcaatctttggaatgtgcggcggcggtcttgcagttgttccggggcttacagatttcacatttatggaagcaaaagacggaaaacttttcgttaattctccaaatgcactggaaggaaatgagatttcaaagtgtaacacagcaagcgctgagtaccagagcaagacagcaggtcttgtagacggaatcggtgcagaggcagagatcctcggacagatccgtgatcttgtatgtatgcttccggcaaacaatgaagatgatatgtcttatgaggaatgtacagatgacctgaaccgtatctgcgcagatattgctaacgcatctgaggatacagcaatcgcactggcacagattgctgacaatcagattcttgttgagacaaagaaagactacgcaaaagagatggttacaggatttatccgcctgaacggaatgacagttggtgttgttgcaaaccgctctaaagtatacaatgcagaagcagaagtagaggctgagttcgacagcgtccttacagtagatggatgcaagaaggcaacagattttgtaaacttctgtgatgcattctcaatcccggttcttacactgacaaatgtaacaggatttgctgctacagtagagtcagagaagaacatggcaagcgcagttgcaaaactgacatatgcatttgctaacgctacagtaccgaaggtaaatgtgatcgttggtaaggcattcggaagtgcttacgtttctatgaacagtaagtcaattggtgcagatcttgtttatgcatggccaacagcagagatcggaatgatggatgcgaagcttgcagcacagatcatgtacgcagacgcagatgctgagactcttaatgagaaagcagctgaatacaaagaacttcagtcaagcccgaattcagcagcagcaagaggatatgttgatgcgatcatcgagccggcagatacaagaaaatatgtgatcggagcatttgagatgctgttcacaaagagagaggaccgtccggctaagaaacacggaacggtttagtgaggtgaggcgaagtgaagaaaaaaatcagtttattaggacttatcctcattctcgttcttagcttcacaggatgtggtaagtctgagacaacagaatatgatcaggcaacattagaacagtatgctgagtttgttgttcagaatttcgaagcgatgacaacagagcagcttgacagcttttctgatatgcgtgatcttcagcttgacacacagcttatgaatgcaggacttccggttgatggagaggacttccttacaatgatcagctcctgggaagcagcagaagaagagtgcggtgcttatgttgaacatggcgactggacaatggaagtaaagaacgatggagtttcactcacatctgaagcaaaatatgaaaacagagatgcagacatcgtcttcagttttgacgaaaagggcaacatggagagtatggatgtttctgctcattattcaacaggagaaatccttgagaaagccggtctgaatacggtacttggtatgggaactgtattcgttgtattgattttcatttcattcattatttatctgcttggatacattccgaaacttcaggagaagttggcaaataaagataagaaagtggaagagaagaaggaagcacctgtacaggcagctccagcaccggtagctgcagcagaagatgatgcagaacttgtagcagtaatcgcagcagcaattgcagcagcagagggaacttctacagatggatttgttgttcgttctattaagagaagaaaatcaaacagatggaattaatcaggaggataattagatgaaaaactatacaatcacagtaaacggaaatgtatatgatgtaacagtagaagagaatggtgcaggcgcaccggttgcagcacctagagcagcagcaccggcagctccggcagcagcaccgaaagcggcagcaggcgctggaagcatccaggtaaaagctggagcagcaggtaaagtattccaggttcctacatctgttggacagaaggtagaggctggagatacagttattatcattgaagcaatgaagatggagatcccagttgttgccccagaggcaggaactattgccagcattgatgtggcagtaggtgatgctgttgaatcaggagctgtacttgctacattaaactagtaactgaaccaggaggtttttacaaatggaatatatttcaaatacattgggaaacctcgtagaacagacagcgttcatgaatcttacatttggtaacctgatcatgattgctgttgcctgcgtgtttctctatctggcaattcgccacgaatttgagccactgcttcttgttccaattgcctttggtatgttgcttgtaaatatctatccggatattatgcttcatgctgaggatgcagcgaacggaactggtggacttctgtattacttttatcagcttgacgagtggtccatccttccttctctgatcttccttggagttggagcgatgacagactttggtccgctgatcgcaaacccgaagagtttcctgcttggtgcagcagctcagttcggtattttcgcagcttatcttggagctatggctcttggattttcagacaaagcagcagctgctatctccatcatcggtggagctgacggcccgacatctatcttccttgcaggtaaactgcagcagacagctatcatgggaccgatcgccgtagcagcatactcctatatgtcacttgtgccgatcatccagccaccgatcatgaaacttctcacaacagagaaggaaagaaagatcaagatggatcagcttcgcccggtttctaagcttgagagaatcctcttcccggttatcgttacaatcgttgtatgtgtgattcttcctacaacagctccgcttgttggtatgctgatgcttggtaacctgttcaaagagtgtggagttgtaagacagctgacagagacagcttccaatgccctgatgtacatcgtagttattcttcttggtacatctgtaggtgctacaacaagtgctgaagcattcctgaactggaatacaatcaagatcgttatccttggtcttatagcatttgcattcggtacagctgccggagttctcttcggtaagttaatgtgcgtccttacacatggtaaggttaacccgctgattggttccgctggtgtatctgcggttcctatggcagcccgtgtatctcagaaggttggtgctgaggcagatcctacaaacttccttcttatgcatgcaatgggaccgaacgttgccggagttatcggtactgcagtagcagccggaacatttatggctattttcggcgttaagtaaattaggaggataaataaatggcagaaattgaaaaaaaaccagttaaaatagtagaaactattctgcgtgatgcacatcagtctctgattgctaccagaatgacaacagagcagatgatgccaatcgttgagaagatggacaaggttggatatcatgctgtagagtgctggggtggagcaacattcgatgcttccctccgtttcctgaaagaagatccatgggagagacttagaaagttccgtgatggattcaagaatacaaaacttcagatgctgttccgtggacagaatatccttggatatcgtccatacgctgatgatgttgtagagtatttcgtacagaaatctgtggcaaacggaatcgatatcattcgtattttcgactgtctcaacgacatgagaaatcttcagacagctgtaaaggctgcgaacaaagagaaagctcatgcacaggttgcaatgtcttatacactcggtgatgcttacacaatggagtactgggtagaccttgcgaagagaatcgaagatatgggtgcaagctcaatctgtgttaaggatatggcaggacttcttgttccatataagacaacagagcttgttggggcattgaaagatgcagtaaatatcccgattgagatgcatacacactacacatcaggtgttgcttctatgacatacatgaaagctgtagaggcaggagctgacatcatcgatacagcaatgtctccattcgcacttggaacatctcagccggctacagaagttatggttgagacattcaagggaacaccatacgatacaggacttgatcagagtctccttgcagagattgctgattacttccgtccaatccgtgacgatgctcttgagagcggactgctcaatccgaagaaccttggtgttaatatcaagactcttctgtatcaggtaccgggaggaatgctttccaacctgacatcccagctgaaagagcagggagcagaagataagttctacgaagtacttgaagaagtaccgcgtgtacgtaaagatcttggtgagccaccgcttgttacaccatcttcacagatcgttggaacacaggctgtgttcaacgtactgatgggtgagcgttataagatgatcacaaaagagacaaaggatgtacttgcaggtaaatacggtaagacaacaaaaccggttgatccagaacttcagaagaaggctcttggagatgaagaaccgatcacttgccgtccggcagatcttatcccggatgagcttgatacacttcgtaaagagtgtgcacagtggatccagcaggatgaggatgtactgacatatgcactgttcccacaggttgctgttgacttcttcaaatacagacaggctcagcagacaaaagtagatgctacagtagcagatacagagaacggatcttatccggtataatcctgactgatttagttagattatgaattgaatagaaagaccagaagataacagattgaaagatttgtgttttctggtctttttcatttgtaaggaaatttatttggtggtatcatagatgtgtacaattttgaataatcaagttttttataatatgagtttgattgttggaatatatggaggcagatatgagtgttttagacagaatagagcgattacgaaatgtaatggaacagcagaaaatagactgctatatcatccctacagatgactatcatcacagtgaatacgtcggtgattattttaaattccgcgaatatataacgggctttacaggatcagcaggtaccgcagtttttacaaaggataaagcgggactctggacagatggaagatattttattcaggcagaagctcagttgaaggggagcgggatcacgctctataaatcaggagaatctgatgttccaacgatagaagaatttttaaaaagtgagctgaaagaaggggatgttctgggatttgatggtcgtacagtgacttatgcacaaggaaaacgatattgtcatatcgcagacgagaatggcgcatcattgaaataccgcttagattttgcacagaatatctggaaggaaagacctgaaatgtctatggaacctgtattttctctagaagatgaatatacaggcgaaaaaattggatccaaattagaacgagtcagagaagtgatgaaagaaaatggatgcaatgcacatgttttatcgagtcttgatgatattgcatggcttttaaatataagaggaaatgatattgcatattgtccacttgttctttcttacgcaatcgtttataataattcagttgagctgtttgctgacattagaaaattctctgacgatattataaatttgttagcagaaaatcaagtgaagatttatccgtatgaggatatttatcgcaaagtttcagaaatgacatcagaagataagcttcttctggattctgcaatcatgaattatagtctttatcaggccatttccaaagagacggtgattgttgataagcagaacccggaaatcctgatgaagtcagttaaaaatgaaacacaggcagagaatttgagaaaagcgcatttgaaggatgctgttgcacatacaaagtttatgtactggttaaagaagaatattggcagagtggagattacagagttgtctgcttctgccaggctggaaggattacgtgcagagcaggagcatttcctcggaccaagttttggcccgatcagtgcatatggagaacatggggcaattgttcattatagtgcggatgagaaaagcaatgtccctttaaaagaaggaaagcttttcatgacagatacaggaggtcattacctggaagggtctaccgacattacgcgtacggttgcacttggagaagtggggaatattgaaaaagaatatttcacattggttgcaagagcaatgctgcgtctggcaaacactgtatttctctatggatgcagtggtgcgaatctggattgtattgcaagagaggtcttttggaaagaaggattaaactttaatcatgggacggggcatggtgttggttatttattgaatatccatgaaggaccgatcaatttccgttggaaagagggagagagaccggctccggcattggaagaaaatatggtgattacagatgaaccggggatctatattgagggttcccatggaattcgtctggaaaatgagctgcttgtcagaaaaacagttaagaatgagtatggacagtttatgaattttgaaattcttacttatgtaccaattgatctggatgcaatcttgccggagaaaatgagtacagaagagaaagaaatgctgaatcattatcataagcaggtttatgaaaaagtgtccccttacctttcagaggaagaacgaatctggctgaaagagtacacgcgggctgtgaagtaatcagcaaagcagaggtatgacagaactcttatgtatctgttgaagctgatggacggataatgaaatatttagggattaggaatagtgtaaaagaatggaaacatcagaacgcaatattgaagcgaatatgaatgagctgatcggaaggatcgaagcaaaatatgagaagatgagcaaggggcagaagcgccttgcagaatatgtgaaagaaaattatgataaggctgtatttctgacagcggcgcgtcttggagagattgtgggtgtcagtgaatctacggttgtacgatttgcaacccagcttggatataggggatacccggaatttcagaaagcattggaggaacttgtccgtaataagttgaattcaatccagcgtatggaagtgacctatggacgaattacacagagtgagatccttgaaacagttcttcagtcagacattgagaaaatcaagatgaccttgtctgcaatcgatcataaggcatttaactgggcgattgatacccttttagaagcaaagagaatctatgttgtgggaatcagaagctgtgcaccacttgcttcttttatgggattttatctgaatcttgtatgcgacaatgtaattacagtaaatacaaacagttccagtgagatttttgaacagatcattcgaatcggggaaggagatgtgattataggaatcagtttcccaagatattcgatgagaacattgaaagcattggaatttgcgaacaatagaaaggcaaaagtaatcacacttactgacagtatccattcacctatgaatcagtattcttcctgcaatctgatcgcaagaagtgatatggcatctattgtcgattcacttgttgcaccattgagtgtgatcaatgctctgattgttgcaatctgtatgaaaaaacagaaagaagttgtctcgacattagagactctggagaaaatctggggtgaatatcaggtttacagcggagaagaaagcagccaggaaggtggcagcgcaggaacgaacgagtcttacagacagaataaaggagaagaatagagcatgagtaatgtgatcgtagtgggcggcggggctgccgggatgatggcggcagttttcgctgcaagaaatggtcagaatgttcagttgcttgagaagaatgaaaagcttgggaaaaagctgttcattacaggaaaaggacgctgcaatataacgaatgccgctgatatagaagatttatttacggcggtgacaagtaatccgaaatttttatacagtggattttacagttttacaaatcagcaggtgatcgatttctttgaagaacttggtgtgaagacgaaaattgaacgtggagaacgagttttccctgtttcagatcattcttctgatgtgatcgcagcattttcaagagagttaaaatcattaggagtagctgtttctcttcacacagaggtgagagaactgctttgtgaacaggataaagtgtgcggggttttattaactaatggaaagaaaatgaaggcagatgctgtgattgttgcgacaggtggtatttcctatccttctacgggttctacaggcgatggatatcgttttgcgaaagaaacagggcatagagtgacagaactccttccatcacttgtaccgatggaagtcagacaatggtatgcgaaagaattgcagggattatctcttcgaaatatagaaatttgtatcacagatgggaagaaaaaactctacgaagaattcggagaaatgctttttacacattatggtgtaacaggaccggttattctgagcgcgagcagtgtggtgggaaaaattttaagaaaaaaagaacttacacttcatatagacttaaaaccggcattgagtgaggaacaacttgataaaagaatcctcagagagtttgatgcaaaccataataaacagtataaaaattcaatcgattcactctttccggcaaaattaaagcccgttatgatagaactctcggagattgaacctgagaaaaaagtgaatgagattacaaaagaagaacgacagagactggttcatctgatcaaggattttacaatgacattgacagggcttcgcagttataatgaagcaatcattacaaaaggcggagtatctgtaaaggagatcgatccgggaacaatggaatcaaaaaaaatgaaaggattatatttcgccggagaggtgcttgatcttgatgcagtgaccggaggatataatcttcagattgcgtggtcaacagggtatcttgccggaattaacgcaggatgtgattgaaattttactggggaatgtctgaatcctgtgacaggaagaatagatgttactgttagatttgaaaatggaatgtagaaagaaaagatggaggaataaaaatgggatataatgtagcaatcgatggaccggcaggggcagggaaaagtacaattgcaaagcaggttgcaaaagaaaacggatatatttatgtagataccggcgcaatgtaccgtggattggccattcactttctgaatcttggaattgatccaaaagatacagaaaagattatagaggcctgcaaagatgtggaagtaacgattggttatgaaagcggaatccagcagatctatgtaaacggagagaatgttacagcaaagcttcgtacagaagaagttggaaatatggcttctatgacatctgcgattccggaagtcagaggaaaactcctggaacttcagagaacgcttgcaagagagaaggatgtgatcatggatggaagagacattggtacccatgtgcttccagatgcagatgtaaaaatctatcttacagcaagcgtagaaatcagagcaaagagaagatataaagagcttgttgaaaagggagtgcagtgcgatctgaaagagatagagaaagatattgaagaaagagactaccgtgatatgacaagaaaaatcgcgccactgaaaaaagcagaggatgcgatacttgttgacagttcggatatgacactgaaagaagttgtaaacacgatttccagatattgtcatagataaatttgcaggagttggatagaatgaaagtaataaaggcgaaatcagctggattttgtttcggcgttaagcgtgcagtggatacagtttacgaacaggtgaaagagaatcagaatcttccgatctatacgtatggtccgattatccataatgaagaagtggtgaaagatctggagcagaaaggtgtgatcgtccttcgcagcgaagaagagctggatacactggaaaggggaactgttattatccgctctcatggggtggcaaaagatgtgtatgacagattggaaagtaagaaaatccagattgtagatgctacgtgtccatttgttaagaaaatccataatatcgtgcagaaacacagtgagatgggcgagaatattattatcattggaaatccggaacatccggaggttcagggaattaagggctgggcaggagaccatgtagaggtctttcagacaaaggaagaagcagaaaattattcttgtgagcaggggaaaaagatttgtatcgttgcccagacgacatttaattacaataaatttaaagaattagttgaaattcttgaaaaaaagagttatgatgtaagtgttttaaatacaatctgtaatgctacgaaggagcgccagacagaagcgcagagcatagcagagacggtggatgctatgatcgttattggtgacaaacatagttccaatacccagaagttatttgaaatatgccgcaaagcatgtaacaatacgtactatatacagacacttggcgatttggatttgaatcaattagggtcagtggaaacggtaggtattacagcaggggcatccacgcccaacaatataattgaggaggttcaaaataatgtcagaattatcttttgaacagatgttagaagagtcatttaaaacaattcacaatggagaggttgtcgaaggtacagtaatcgacgtgaaaccggatgagattatcctgaacattggatataaagcagacggtatcattacaaagagcgaatattccaacgatcagtctcttgaccttacaacagttgtatccgtaggtgatacaatgacagttaaggtactgaaagtaaatgacggagagggtcaggttcttcttacatataagagactggctgcagaaaaaggaaatgagagactgcgcgaagcatatgaaaaccacgaagtgctgaaagctacagttacacagattcttggcggcggtatttgtacaacagttgatgaagtaagagtatttatcccggcaagccttgtttccgattcttatgagaaagatctcagcaagtatgaaggacaggaaatcgaattcgtaatcagcgagttcaacccgagaagaaaccgtgtgatcggtgatagaagacagcttcttgtagcagagcgtgctgagaagcagaaagagctgttcgcgaaactcaatgttggtgatacagtagaaggaactgttaagaatgtaacagatttcggagcattcgttgaccttggtggtgttgacggacttcttcacatctcagagatgtcatggggaagagttgacaatccgaagaaagtattccatgtaggagatacactgaaagttcttgtaaaagacattcatgatacaaagattgcgctcagcctgaaattcccagagacaaatccatgggtaaatgcagcagaagatttcgctgtaggtacagtagttacaggaaaagttgcacgtatgacagactttggtgcattcgtagaacttgcaccgggagttgacgcacttcttcatgtatcccagatttcaagagctcatgttgagaaaccatctgatgttcttgcaatcggacaggaaatcacagctaagatcgttgatcttaacgaagcagagaagaagatcagcctgagcatgaaagctcttgaggctgacaacgctggagagacagaggaataagatataaattattttttagaagaacctgccattggcaggttctttttctgttaaaaattcgacaagatgtatagcgaaagatacaagaattattacatatttgctagattttcagagcgcattctagtaaaataagtattacaaaattaaaatattattgttgtaatgacaatgataaaagaaaggaaggaaatgagatggggcttttgacatttaaaggcggaatccatccagatgatggaaaacgtttttcaaaggatcagccgatcagacctgtagtacctcagggtgaactggtctatccactttcacagcatataggagcaccggctaaaccggtagttaagaaaggcgattgtgtgctgaaaggacagttgattgctgaagcgggaggatttgtatcttctccgatctattcatctgtctccggtaaagtgaaaggattggaacaacgttttaatccaactggatcccaggtggagtgcattgttgtagaaaacgatggagagtataaggaagttgaatatgaaccggtaaagcctttggaagagatgacaagggaagaaatcattaataagattggagatgccggaatcgtaggaatgggtggtgcaggattccctacaaaggtaaagctttctccgaaggaaccggataagatagaatatattattgcaaactgtgctgagtgtgaaccttatatcactgcagattacagaagaatgctcgagtatacagaagatcttgtcagcggaatgaaggtcatcctttctttattcccaaatgcaagaggtgtttttgctgtagaggataacaagaaagattgtattgaaaagttacagaaagcagtttccggcgatccaagaattgatgtgaaagcattgatgacaaaatatccacagggggcagaacgtcagttgatctatgcagtgacaaaacgagcaatcaattctaccatgcttccggcagatgcaggatgtattgttgataacgtggagactttgattggaatccacaatgcggtaatcaaaggaaaaccgttgatggaacgtgttgttacagtgagcggcgatgcagttgaaaaaccaggaaactttatggctccttttggaataaaccacagagagctggttgaggcagcaggaggtttgaaagcggaaccgcagaaactgatctccggaggaccgatgatgggatttgccatggtgacaatggatgcaccggttacaaagacttcttcctctattctgctttttaaagaagacgttgtggcaaagagtcttgagactgcatgtattaactgtggaagatgtgtggagatctgtccaagcagaattattccatccagacttgcagacttttcaaagagaaaagatgaggcatcttttgttgcatggaatggattggaatgtgtggaatgtggttcctgcagttatgtctgtccggcgaaacgtcagctgaaacaggcaattggttcaatgcgtaagacagcattggcgaatagaaagaagaaataagagaggttgaagtaaagtgaacgagaaatataacgtatcttcttcgccgcatatccgtgataaagtgacaagcagcaacattatgctttatgttgtgatcgcacttcttccggctacatttttcggaatctggaatttccgtcatgagaatgcctggattcttgtagttgttacaacggcagcggctgttttatctgagtatctttatgaaaaattaatgcataagccaattacgatcaatgatttcagtgcggttgtaacaggacttctgctcgcattgaatcttcctccgacactcccgtggtggatgggtgtgcttggtgcagtatttgctatcattgttgtgaaacagttgtttggaggacttggacagaacttcatgaaccctgcattgggagcacgttgttttctgctgatctgttttgcaggaaagatgacttattttgtttacgacggagtgacaggaccgactcctctagcagaactgaaagcaggagaaacagtgaatacattgtctatgcttctcggaaatatcagaggaacaatcggagagacttctgtagttgcaattatgatcggtgcaatgttcctgattcttatgggtgtaattgatcttagaattcctggaacttacattgtgacatttgtgatttttatcacattgtttggaggacatggattcgatcctcagtacatcacagcgcatctttgtggtggtggtctgatgcttggagcatggtttatggcaacagattatgtaacatctccgatcacgagcaaaggaaagatcctttttggaatctgtcttggatgtctgacgggtctgttccgtctttttggtggatcagcagaaggagtttcctatgcgatcatcatcagtaaccttttagttccattgatcgagaaggttactcttccaaaaccatttggtaaaggaggagagaagtaatgaataaaattgttaaaaacacgttgattctgacagcaatcactgttgttgcaggtcttcttctcggagttgtatatggtgtgacaaaagatccgatcgctaaagcacaggaggaggcaaaacaggaagcatttcgttctgttctttcagatgcagagacatttgaatcggatacagaatttgatgctgatgcagcttctgctcttctgaaagaaaatggatacacttcagatgatatatctgagttggctgagggaaaagacgcttccggtgagacggttggttatgtcgtaaatgttacatcacatgaaggatacggcggagacattgatatttctgtaggtatcagggaagatggaacagtaacaggtattgagatgctcagtatcagtgagacagcaggtcttggaatgaaagctaaggaagcagatttcaaagatcagtttaaagataagaatgtaaaaaagtttacatatacaaagacaggagagtcaggagatgacatgatcgacgccatcagtggtgctacgatcacaaccaatgctgtgacaaatgcagtagactctgcacttgtatattttcaaaatgagttaggaggcggaagtaatgaataaatgtacagaacggctgtataacggccttgtaaaagaaaatccgaccttcgttcttatgcttggtatgtgtcctacacttgcggttacaacatctgcaatcaacggtgttggtatgggactttctacaacagttgtattgatcatgtctaacatgttgatttctatgttgagaaagattattccggattctgtcagaatgccggcatttatcgttattgttgcttctttcgtaacaattgtacagttcttgatggaaggatttgttccaagcctttatgattcactgggactttatattcctctgatcgttgtaaactgtatcattctcggaagagcagagagctatgcttcaaagaatccggttcttccttctatctttgatggaatcggtatgggacttggatttactgtgggtcttacagcaatcggtattgtcagagaactgatcggtgctggtaagatctttgatatccgtgtcatgccggaatcttacgagccactgacaatcttcatccttgcaccgggagcattctttgtccttgcaggtcttgttgctttacagaataaagtaaagaacaatatggcaaagaaaggaaagaaggttccggagacagtcggatgcggagaaggctgtgcaagctgcgggaatgcttcatcctgcagtggaaagatcttcccgacaggcgaagaagacgcaaagaacgaataaaggaggggacagaaagtgaaagaattattattaattgcagttggttcagcatttgtaaataatgttgtcctgagccagttccttggtatatgtccgttcctcggtgtatccaagaatgtgaagactgctgccggaatgggcggagcggttgtattcgttattacgatcgcatcttttgtaactggattgatctataagtttattctcggaaatccaaatatcatgggaggagaattatcttacctgaatacgattgtatttattcttgttatcgcagcacttgtacagtttgtagagatgttcttaaagaaggtgatgccatcattatacaatgcgctcggtgtatatcttccgttgatcacaacgaactgtgcagttctcggagtagcactgacaaacgtacagaatggctactatgatgacatgagtgcaggtatggggcttctcacaggtgtcgtaaatggatttgctacagctgtcggattccttgtatcaattgtgctgatggccggaattcgcgagaagattgaatacaatgatatcagtgagtcatttcaggggactccgatcgtgcttgttacagcaggactgatggcaattgcatttttcggattctcgggattaatttaggaggaagagcaaatgagtatgacaggaattattttggcggcagtagtcgtcggtggaaccggtttattcatcggtgttttcctcggaatcgcaggtaagaagtttgctgtaaaagtagatgaacgtgaagaagcgattttaggcgttctcccgggaaataactgtggtggatgcggttatgcaggctgttcaggacttgcagctgcaatcgtaaaaggtgaagcagaagtcagtggatgtccggttggtggggcacctgttgctgcaaagatcggagagatcatgggtgttgcagcaggcacacaggagagacagaccgcttttgtaaaatgtgccggaacctgcgaaaaagcaattttagattatgattacacaggtattcaggattgtacgatggcaagcatgatgcagaatggaggagcaaagggatgtaattcaggatgtcttggattcggttcttgtgttgctgcctgtccatttgatgcaattcatgtagtagatggaattgctgttgttgacaaagaagcatgtaaagcatgtggaaaatgtattgcagcatgtccaaaacacctgatcgagctgattccatatgagcagaagacatttgtacgctgtaattccaatgcaaaaggaaaaatacagttgacaatctgtcaggccggatgtatcggatgtcgcatttgtgagaagaactgtgaagcaggagcgatcactgtaacgaatttccttgcacatatcgatgcagataaatgtacagagtgtggtgtttgtgtagaaaaatgtccgagaaagattattacgttacgttaataatacgacaggattttattgaaaaaagagatcagaaaaggaagctgaagatttaaaatgatcagcttccttttctttagttatcaatatcagtgattaaatcgacagagtcactgcttttataaatcgtattgtcatcggtaataaatacagcctctatattatccatacttcggataagttttaatccttcatccagtccaagtgcataacaggttgtgcttaaggcgtccccgtcaaccgatttgtcagagatgatcgtgacctggtttaagttattttctattggatatcctgtagaagggtcaatgatatgatggtaaatctttccgtctttcttaaagtatcgttcgtaatttccggaagatacgatggacttatcagataccggaagaacagccataactgtcccgtcttctgcaaatggtttctggataccgatccgaaagttggaaccatccgtttttccaccgagtgtcagtatgttaccaccgagattgatataggcatgttctattccttcttctacaagataattctttacctgatctgcaatatagcctttggcgataccacccagatcaatctttgcataaggatctgacatggttaccgttgttccgttgacttctatatttttataattgatatgagtaacagcttcagccagctgccctgcgtcagggatgctatgatctgcattatcgtgaaaattccaaagatcactggcagaagcgattgtgatatcaaattttccgccggaaagatccccataatattttcccagttcaattaaatcagcagtttctttcgatacagaaacggaggcaccttgtgcctgattgatctgactgatttcactggaatcgatcgtaggacttaagagttgttcatatttctcacagatatctttgcagccatccatgatcttagaatctgctccccaaacttcaatcttaacaacggtgtcgaaataggttcctgtcatagaaagcgactgtgactgatcttttgtggaacatccggtcagcagaaaagaaaatgtaaggaaacaagccagtatttttttgtgtttcataaaatctccgttcttaatataaatgaatgatgtgtttattataacgaggtttgaataaaaatacaatcgaacatgtggttgcattcaaaatatggttgtgctatgatgaattagcaaaaccattatggaagaaagatggtgcggaatgaagaagaatgactggatacttgcagcagctattttttttgtagctgttttaacgattggtttacagcttttaaaaactacagatgaatacagtgaagtagagattcaggtaaatggcgagttgtatggaagataccgcttggaacaggatcaggaaattgatgtaaatgataagaataaagtactcataaaggacagaaaggttcgtatggaagatgctgactgtccggatcagatttgtgtaaaccacagagcaatttcaagagatggggaaagtataatctgcttgccgaatcagactatagtaacgatccgtggcggagaggaaccggaggtggatgagattgcacggtagaaaagtagcgatatttggcgtatttacagcattggcattgatttttagctatgtggaacttttgattccgattaatttcggaataccgggagcaaaacttggtctggcgaatcttatgacagttcttgttctgtacaagatggggataaaagaggcactggcactttccgtgacaaggattattttatcgggcttcatgttcggaaatctgtttggtattctatatagtttatcaggaggacttttgagtttccttgttatggttctccttaagaaatcagacaggttcagtgttgccggagtcagtattggtggaggtacagcacataatatcgggcagcttcttgttgcaatggttgttgtacagacatatcaggtggggtattatctgccggttttgttagtggcaggagaagtgaccgggctgctgatcggacttgtggcaaaagaagttttaaaaaggatccagggaatttctctggtataattattatggaagcgttgcggttttggtgcagcgggaaaaggatagaggaagatgatatcatatattagaggtgaactggcagcagtccaggagcagaaagcgattgtggaagcgggtggaatcggatacggaatttatatgtcgcagcagacattatccatgcttccggcagttggggaagaagtgaaaattcatacatatctcaacgtgcgtgaggatgcaatgcaattatatggatttctaacaggcgaagatcttcaggttttcagactgttgatcggtgtcagcgggatcggaccgaaagccgggttgaatattctttcctgcctttctccggatgaacttcgttttgccgtgctggccggagatgtaaaaacaatttcatcagctcctggaattggaaagaagaccgcggaaaagctgattctggagttgaaagataagatgagcattgaggatgttctggaacaggcagcacatggcagtgaacagtcaaaagaaattgaggcgacagataccggaatgcaggcggaagcggtacaggcactgacagcacttggttatggaagtgcagagagtttacgtgcagtgaagaaggtatctgttgattgtgcgagtgtagaagatcttttgagagaagcgttaaagaatctgctctgaacagttacaaaatttgaagtaaagagttatgaaatgagaggtcggttatggcgaagagaattataacgacagagaatctggaagaagacagtaagatagagggacagttaaggccgcagcttttatcagaatatatcggacaggagaaagcaaagaagacacttagtatttatatagaagcagcgaaagcaaggggcgaagcactggatcatgtgctgttttacggaccgccggggcttggtaagacaacactggcaggaatcatagcgaatgagatgggtgtaaatatgaagattacttcaggaccggcaatagagaaaccaggcgagatggctgcaattctgaatggtctgcaggaacatgacgtattattcgtggatgagattcacagacttaaccgtcaggtggaagaagtgctttacccggcaatggaagattatgcgatcgacattatgatcggaaagggaccgggagcaaggtctgttcgtctgaatcttcccaaatttacactggttggggcaacaacaagagcaggaatgcttacagcaccgctcagagaccgttttggtgtagtgcatcatttggagttatataatgaagaagagttgaagacaatcattctgcgttctgcacatgttctaggtgtagagattgaagaagaaggtgctatggaacttgccagaagatcaaggggaacaccgcgacttgcgaaccgtctgctgaaaagagtgcgtgactttgcacaggttaaatatgatggtgtgatcacaaaagaagtagcaaattatgcattagatcttcttgacgtggataaattcggattagatcatattgatcgtaacattctgatcacaatgattgagaagttccagggaggaccggtaggacttgagacacttgccgcatcgatttcagaagatgcaggcacattagaagatgtttacgaaccgtatttgttgaaaaatggattcattcagaggactccaagaggtcgtgttgtaacagaattagcttaccaacatcttggaattccgagagaagtatagaaattctgaaaaaatagttggtttttgaggataaatagtctataatagaagaatagaaactcgaggaggaagctatgagttcagcaaaacattttacagaagtattaatcggaggaaaagtctatactctcagtggctttgaaggagaagagtatctgcagaaagtatcttcctatcttaatcataaaatcacagaatgtacgaacagtgaaggatacagaaaacagagtgcagacacaaggaatgtccttcttgcacttaatattgcagatgattattttaaagcaaagaaacagggagattccctggaaagcgatatcgagctcaaggataaagagatgtatgatctgaagcatgaattgatttcagcccagatcaaacttgagaatgctgagaaagagcttgcaaagatgaaagaagagaataatgaccttcagatgcagattgttaagctcgagacagagatgaaaaaccgaagaaggtaaatgagaaaagctgtcactttggcagcctttttcatttacgcgaacaacgagccaaagtccgtacttgcacaagaccttggcgattgtcgcgataacttgagaaactcgcggagcgtgtttctcatagattatgtgaacataataataaagagaaggataatgacagaagaatgagaaaagaccgacaggtggagattctggctccggcgggatcctttgcatgttttcaggcagcaatgaatgcaggtgcagatgccgtttatgcggcaggagcacgttttggagcaagagcatatgcaaacaattttacacaggatgaactgatcgaagcaattgagcgtgctcatatttatgggaagaagttttatcttacagtaaatacattattaaaagatcatgagattgcagaactgtatgattatctggcaccattatatgagaaaggtttggatgcggtgatcgttcaggatacgggtgtattccaatttatcagaagcaattttccggatcttgatatccatgcgagtacacagatgacaatcactggtgcggcaggagcaaagtttttagagagtcagggggcggcaagagttgtcccggcaagagagctttcgttggaagaagttcgacagattcatgaaacaacggaccttgaagtagagtgttttgttcatggagcactttgctattgttactccggacagtgtctgatgagtagtgtgatcggcggccgaagtggaaatcgtggtcaatgtgcacagccatgcagacttccttatacagtagatggtcagaagaaatattttcttagcctgaaggatatctgtacgttggaattaattccggaactggttgaagccgggattgactcatttaagatagaaggacgcatgaagaaaccggaatatgtggcagcagtaacagctatgtatcggaaatatgtggatttatatttgagaaaagggaaaagcggttatgcggtgaaaccggaagaccgcgaaaacctgatggatctttataatcgcggtgattcagataccggatattataagcagcataatggaagagaaatgctggcactggatcgtccgaatcatgccggagtagcagcagccagatgtctgtcgcaaaatggacgtgaggtcacagctcaggctttgacagatctgcatgcacatgatgtccttgaaatcggtagcgggaaagataattatacacttggcaagaagatcacaaagggagaaaagttacgttttcttgtgccgaaggggatgcgttttaaagaaggctttgtttttagaagaatccgaaatgaagaactgattgagagtttggatcagaaatacaggaaagaagaccggcaggaggatatttatggatttttgagccttcaggttggatatccggcatcttttacggtctgctgcagggaattttcttatacagcatatacagaacatgcagttgaacgtgcacagaagcgcccattggaggaagagagaattcgcacacagcttgcgaagacaggcggtacgctatttttcctgaaagatctggaaatatctatggatcaggatgcatttcttccgatgcagcagctgaatagtttaagaagagcagcactggatggattgagaagagagatcgcaactgctttttacagggaatgcaacccttcaacgacacaggtagaaacatttaaagaagagacaggaaatggaaatctgaacagatattctgtgtttattgaaacagaggaacagttagagaccgtgttcagctttttgaatcagaaagaggaactttatggacagggaactcaaaggattggccggattgcattagatttccggttgtttggcacaggtttttcagacacacatgtcagagacaggattgatttttggagaaaaagcggagttgaattgtatctggtatttccacatattttcagagagaatgcgcaggaatggtttggaagacaatttgaaaactttaatcaattgccaattgacggcgttgttattcgaaattttgaagctttctttttcttaaaagaaagaggatttgacaaaaagattatattagaccataatctatatatctttaatcagtatggcaaagaattttggaagcagcaaaaagttgaggattttacagctccgttggagcttaacagcagagaactaagagaacttgatatcagagacggtgaacttcttgtttacggaagaattccggttatggtatctgcacagtgtattgagagaacaacttcaggctgttctaagaaaccgggagtacgagtgcttcaagacagaagagacgaaaaattctttgcgcgtaactattgtgatctctgttataatgtgatttatacggaaaatccgatcaatctaagacaggaatgggacagagtgaatgaattgtatccaaagatgcgccgtatccagtttactctggaggataaagaacagacagaaacagttctgaatacatttttcttaacagatgaaaaaactgttgccagaggaaaagaagatacagattttacaacaggacatttcaacagaggaattatttgaagcaggtgaaatatggctaatattattattcaggtatcaaaataccttattatcatcttgatggcggcatatactttttcctgtttttcaatctttacgagaagttatgaagatgaggaaaacaaagtattgatccgtcaggatgtacttctatttatgatacagatcactgcatttattgcaatgtattttgcaacgcaggatctgaggatgatgttcatatatggtgcactggcagtgattgtgatggcagtcatcttattatacaatctgatctacccgaatgtttcgagactggttgtcaataatatgtgtatgttgatcacagcgggaatgatcatgatcacaaggctttccgcacagagtaagtctccttatggaattgcaatccgtcagctggtatttgttgttgttggtattgtttttggtcttattgttccggttctgatccggaagatgactttcctggagaactggacttatatctatgcagcagttggaggagtagcacttcttatcgttgcattgtttgcagcaacacttggaggagcaaagctgagtttcaatattggacctgtgagtctgcagccttctgagtttgttaagattctgtttgtattttttgtagcagcaagcctgaataaatcgacagaatttaagaatgttgttgttacgactgcgatagcggcagcacatgttctgatccttgtattgtcaacagatctgggagctgcattaatcttctttattgtgtatctgattatgctatatgttgcgacaaggcagccgttatatgcaattgcaggtgtggcagcagggtgtggagctgcagtggttggatatcatctgttttcccacattaagatcagagttgcggcatggcaggatccgtttgcagcttatagcgaagggggatatcagatcgcccagtcgttgtttgcgattggaagtggcggctggtttggaacaggattattccgtggtcagccggatacgattccagtggcagagacggatctgatcttctctgcaatgacagaagaaatgggactgatttttacactgtgtctgatccttgtatgcgtcagctgttatgtgatgtttttgaatattgcgatggaattgcgtaatttcttctataaattagtagcacttggtctgggaacctgctatatttttcaggtatttctgcagatcggaggagtgacaaagttcattccgttaaccggagtaacacttccattcgtcagttatggtggaagttctctgttaagtacgatgatcatgtttgggattattcaggggctctacattgtcagagaagatgaagaagcagaagaagagcatcagattgagatgcagcgcgcaagacagagaaaccgcagcaggcagaatgaaagacaccgccagagcagttcgaatgcaaaatcaggaagatcccgtcaggatggacgtgacagacgaagagaatatgatggagataacagagacagagcaagacaaagagaaagggatttaagaaatgaatcgggaagaacgaccggtaagaaaacaacaaaaagcagaccgagattcgaggatgtcccggaacagcggcagcaaagacagcggagaacgcgttcggaacaaagagttcgctagagtcacttactttttcgtgattctctttatcgcgttgatgggatatcttgtatattttatggtcgtgcgggcaaaacttgtagtgaacagtccatataatcaaagacaggatgcttatgcagatacgattatacgaggaagcattattgataagaatggaaatgtgcttgcacagacagtcgttggggatgatggatcagagacgagagagtatccttatggagaagtgtttgctcatgcgatcggatacagtaattccaagcttggaactacgggtctggaatcggtagagaattttgagcttctgacatcaaatgcattctttcttgaaaaattgcagaatgaattcagtgaaaagaagaatcgaggagatacagttgtaacaacattggatgcaaatctgcagcaggcggcttatgatgcgcttggatcaaacaaaggtgcggcaatcgtaatggaggcgagtacgggaaagattctcgccatggtttccaaaccggcatatgatccgaataatattttaagtgactggtcagaattgaattcagatgaagaaaacagtccgctgttgaatcgtgtgacacaaggatcttatgctccgggatcgacgtttaaagtggttacaacacttgcttttatgcgtcagaacagtgattatccgaattatacatatgattgtaatggagagatttcacagggagatattacaattcactgctttaatggaaatgcacatggctcagaggatctgagaagttcctttgcaaattcctgtaattcatcttttgccaatattggtcttggcctggatctgacgcaataccgtcagacggcggaagatttattgttcaataaatcgcttccgggtgtactgaatacagcgaagagctcctttgcactggatcagaattccagtgagggagaagtaatgatgacggcaatgggacagggaaagacaaccgtaagtccatatcatatggcactgattgccgaggcagtggcgaacggtggaaccatgatgcagccatatcttgtggaaagtgtgacgaattatacgggttcccagatacgaaagaatgttccgaaaagttataagaaggtcatgacatcggatgaagctgcacaattgaaagaatatatgacagctgttgtagaggaaggaacaggatctgtcttaaaaggaagatcctatactgctgcaggaaaaacgggaacagcagagtacagtatgtcagatggagaaaagacacattcctggtttatgggatttacaaatgtggataatccggatctggtaatcagtgtgatcacagaaggttcggatggaagttccagcggaaaagcagtggcaatcgccggggatattttagacgcctattacaactaatgggaggagaaaagatgcagacaaaatttttctgtgatttatatgtcagcgaaggctgggaaaagaaaaaactgaaattaataaaaaaattgcagaaaaataaactgcagccttctgtctatgtaattacgctttcacagggaaagcagaaccatttagaatattattcgtcgcttcttttaaagcaacatatatttgataatgcatccttatttattgttggaattgcgaatgggtatgatggcgcattgagtctgatcgaaaggattgcggaagaagcatatgagaagacgggagaggtaaatttgagaaagttccttttggatcgtcaggaagagtttgagaaaaaggagattcgaagcgtatgatacatatcctgtttcttatactgaaaataattggatgtattcttctttttttgctcgtaattttactcttactgattttaacaatcttgttttatccggtgaaatacagattttctgcaaaaggggagaatacacttgatacccttgtggcatatggaaaggtcagttggctgtttcatctgatttccggatcagcgtcttatgaacatggagaattaaaatggaagcttcgtcttgcctggaagaaatttgacagttcggaaaaggaacaaaaggaaacgtcagagaagccggtggttcctgagccgttggaaaaagaacctttggaaggtaagaagacggaagtaaagaataatccaccggaaaaagatgtgaaaattgagaaagcattagaaaaagagccagagataaaaaaagagtcagagacagaaaagacgaaagttcgagaggagcgcaggcccgaaaacgtacagacggaatctaaattgaaaaaaatcaaatatacatttcagaaactctgtggtactataaaaaaagcaggagagaaaaaagaatttctgaccgcttttttaacttatgagaaacatcaacgggcattcgaggcagtgaagaaagaactatgccatctgttacatgttctgaagcctaaaaagcttcaggtgaatgttacatttggattcagtgatccttcctggacaggatatatgttagcttttctggggagtatttacggactgattggtgagtatgttcagatccagccggattttgaagaacgaaagctggagggaaatgcatctgcagaagggaagattcgggttatttactttgctgttcctgcatggaagctattctggaataaagatgtgaagattacctacaaacacattagaaaatatataaaatgagaggagtcaggattatggcagacggaaacaaatttaaagaaacagtagaatcactctttcagggaatggacagcgttgtttcatcaaagacagttgtcggagatgcgatccatatcaatggaacaatcattcttccgctggtagatgtttcttttggtattggagcaggttcttttaacgctgaaaagaaagacagagcaggcggtggaatcggtggaaagatcacaccgagtgctgtgatcgttattcaggatggaaagacgaaacttgtgaatatcaagaatcaggatacaattacaaaacttttggatatggtacctgatgtggtagaccgttttacatcaaaagatgaaaaattaacagaagaagatgtagcagatattctggatgaagaataaaatagttactagaatatagaaaatattgggagcagtattgtgaagaaagtttttggatttgcattgttttggtttgcagcaggaatgatcgtcatgatgctgctttctgatgtcttatggggaactgtgatcgcaattaccggtatcgtactggcatattgtttgttctgcagataaaaaaagaactttatccgaataaacagataaagttctttataccgtgtcatattgaatcatcaaacgagaattaagcacgctcaacgagtcctgatctcaggcaagaagtacaaacgtacattttctgagaaccgccctctgtcttaactcttacagacttcacatttgatttccacatttttggtgatcttctatgagagtggcttacattgtttccaaaatgagcacccttttcacaaatagcacatttagccatgactgcacctcctaacaatctaaactggtcttttagactcataacaatgatattctatcagaaactttcgagtaatgcaagtgttattttaaaaaaatcaaaactgtattgtaaaaaacaaaaagtaatagtataatagtcatgttatatatggaaagaacctatagaattggagggaatatatgatgaagggaagtatgagtacagatcttggaatcattacaatcaatcctgaagtcattgcaaaatatgcaggctcgatggcaattgagtgctttggcatagtaggaatggcagcagttaatatgaaagatggccttgtgcatcttttgaaaagagaaagcctgacaaggggaattcatgttgagatcacagaagataatgtaattacgcttgattttcatgtgatcgtttcctatggagtgaatattctttcagtttctgacaaccttatgaataatgtaaaatataaggtagaagaatttactggtatgaaagtagataagatcaacatcttcgttgaaggtgtcagagtgatagattaaggaggaacaattgtggctgttaaaacgataaacaccgaattgcttcagaagatgtttcttgcgggagcagcgaatcttgaggcaaagaaggagttcattaatgaattgaacgtatttccggtgccggatggtgatacaggaacaaatatgacactgacgatcttgtcagcggcaaaagaagtaaaggcgctggagaatcctgatatggtggcgattgcaaaagcaatttcttcaggctctcttcgtggagcaagaggtaactccggagttatcttgtcccagcttcttcgtggctttacaaaggagatcagggaacataaagagattgacacaattacacttgcgaaggcatgtgaacgtgcaactgcaactgcttataaggctgttatgaagccgaaggaaggaacaattcttactgtagcaaagggagcatcccagaaggcggcagagcttgcagagacaacagaagatctggatacatttatttcagaagtgatcaactatgcacaggaagtccttgaaaagacaccggagatgcttccggtattaaaagaagcaggcgtagtagattccggtggacagggacttctggaagtgatgcgtggtgcatacgatgcattccagggaaaagagattgattattctgcaatcgaggcaagtgccggcacaaagatggtgaagccttctgaacaggcagaaacagagattaaattcggatattgtacagagtttatcatcatgctggaaaaagaattcacagcgaaagatgagacagagttcaaagcatatctggagtctatcggagattctatcgtatgtgtagcggatgatgatattgttaagatccacgtacacacgaatgatccgggacttgcaatccagagagcgctgacatacggacagctctcacgtatgaagattgataatatgagagaagagcatcaggagagattgatcaaagatgcggagaagctggctgcacagcaggctgaagcgaaaaaggcggagccgcgcaaagaagtcggatttattgcagtttctatcggagaaggaatgaatgagattttccgtgagcttggagctgactacattatcgaaggcggtcagacaatgaatccaagtacagaagacatgctcaatgcgatcgatcaggtgaacgcagaacatatctttatccttccgaacaacaagaacattattcttgctgctaatcaggcacagacactgacagaggataaggatattattgtagtaccttccaagacagttccgcagggaattactgcgattattaactatatgccggatgcagacgcacagacgaatctggaagcaatgatcgaaggaattggaaatgtgaagacaggacaggttacttatgcagtccgtgatacacacattgatgacaaagagatccatgagggagatatcatgggaatcggagacagtggaattcttgctgtcggacagtctgtggaagagacaacaaaagagatgcttgcacagctggtggatgaagacacagagctgatcagcctgtattatggtcaggatgtacaggaggagagtgcagagaactttgcacaggagattgaagatttatatccggatgtagatgttgatgtacattccggcggacagccaatctactattatgtactttctgttgaataaggagaactgtcagtaaagagacagaacagcagtactgtattaaaatcaggaacagaccgggacatttgggaaaagtgttccggttattttgtttaggagacagacataaatgagtaaaaaagcaggagttggaacaatcaaaggtgtgggcgaaaaaacggagaagctcttcgaaaaaatcggagtttacacagtggatgacctgattcattattatccgagagggtatgagatttttggagaaccggttccgatcagtgaagtggaggaaggcaaagtctgcacgatctgcggcagtgtttttgggcgtgtacaggtttctccgggaaaaggaagacagatcacgactgcatatttaaaggatctgacaggaacaataaaggtaatctggtttcgaatgccgtttttaagaaatacacttgggcgaaaaggagcagttgttcttcgcggcagggttgtgaagaaaagagattcccttgtgatggaacatccggagatttacgatccggcagtccgttatcaggaaaaaatcaacaccatgcagcctgtttatggattgacagcaggtctgacaaacaatgcagtaatcaaagcactacgtcaggcattagaacaggtgcgggaacaggatgactttcttccggatgaatttacgaagaaatatcatttccggccttatgaacaatctgtgcgggagatgcatttcccggagaataaagaagcatttcttgcggcaagacaacgatttgtttttgaggaatttcttgtttttattctttctctgcgccagattaaaaatacacaggacaggatgaagaacggattccattttgaagatcagcctcaaatcagcgaattcctgagacaactgccgtatgaactgacggctgcacagctgcgggtatgggatgatatgcagaaagacatgaaaagtcaatatgtcatgtccagacttgttcagggggatgttggatcaggtaaaacaatcgtggcagttcttggattactgtttgcaggattgaacggctatcagggagcgttaatggcaccgacagaggtacttgcaagacagcattttgaaaatatcaaagacatgttggaacagtatcagatcccactgcgggcagaacttttgaccggatctatgaaagcaaaagaaaagagagaagcttatgcccggattgagagtggggaatcgtcaattattataggaacacacgcattgatacaggagaaagcaatctatcacaatctggcacttgtggtgacggatgaacagcatcgttttggcgtaaaacaaagagaaatgcttgcaggtaaaggaaacctgccacacattctcgtaatgagtgcgacaccgattccgagaacactcggaattattctttatggtgatctggatatttctgtgatcgatgagctcccgaagaaccgtcttccgatcaaaaactgtgttgtggatacaggataccgtccgaaggcctatgaattcataagaaaacaggtggcacaaggacgtcagtgctatgtgatctgtccaatggttgaagaaagtgaagcaatggaagcggaaaatgttatcgattattgcgagatgctttcagaaacgttgggagattcaatcaatgtcagctttctgcatggaaagatgaaggaaaaagagaaagatgaagtgatgaatgcatttggaagaaatgaaatccaggtgcttgtttcaacaacagttgttgaagtgggaattgatgtgccgaatgcgacagtaatcatgatcgaaaatgcagaacgtttcgggctggcgcagcttcatcagttgagaggaagggttggtcgtggaaagtatcagtcctattgcattttcatgacagcatcgaaatcaaaagaaacgaaggaacggttagatatcctgaatcattcaaatgacggtttctttattgcaagtgaagatctccgactgcgtggcccgggggatctttttggaatccggcagagtggcgtgcttgattttaaagttgccgatgtatttcaagatgcaaagctgcttcaaaacgcaagtgaagaggcagacagacttcttttggacgatccggaactggaattccctgagcatcgcaaattgaaagaacatttacggataaaactggatgagatcatgctggaaacaacattgtgatgtttgcggattacagcaaatgtatagcaatggagcaatccggctgcatcagtgattgccagaagttaccagtttaaaattaattttcctccacatactaacagcgtaacaaagctaaatagtaaagttacaaaatgcaaaaggaggaaaaagatcatggcaagtcgttcatctaacaaaacagcagtacctgaggcgaaaggagctatgaacaagttcaagtacgaagtagcatccgagttgggagttccgttaacagacggctacaatggagacctcacatcaaaacagaatggttctgtcggcggttatatggttaaaaagatgattgaacagcaggagaagcagatggcagaaaagtaacaggcgaagaaaaatcgtctgcagaagcggtctgcatcagacagaaaagcggttcaaaaactgtcatgtacagtaaaaagaacacaagaaatgaaaaagagaaaagcactcggcattgacccgggtgcttttttctgctaaaattcaccatagttaatgacaggaggtgtcgatatttgagagtaatcgcaggaagcgcaagaagcctaaaactgaagactcttgaggggatagagacaagaccgacaacggatcggatcaaagagactttgtttaatatgataagtccgcagatgtatgactgtattttccttgatttgtttgcaggaagtggcggaatcggaatagaggctctcagcaggggagcaaaagaagcagtatttgtagagaaaaatcctaaggcgatggaatgtgtcaaggagaatttgaaattcacacgtctggagaagaagggacttacactgacaaaggatgtgatgaacgcattatatcagttggaaggtgaaaaggtttttgactttgtattcatggatccaccgtataatatgggatttgagaaaagagttctggaataccttgcaggatcggatctgatctatgaagatacggtgatcatcgtagaagcttcgttagatacagattttggatatcttccagaattgggatattctttgatcaaagagaagagatataagacaaacaagcatgtatttattgagaaagccggaaaggaagaagtatgttaaaagcaatttatccgggaagttttgaccccgttacccgtggacattatgatatcatttgcagatcttgtaaaatcgtagacaaattaattgtcggagtactgaataataaagcaaaaatgccgttgttttctgtagaagaacgtgttaaaatgttaaaggaagtgacgaaagatctgccgaatgttgagattataccatttgatggattgctggtagactttgcggaacagataggtgcagatgtggttatcaggggattacgtgcgattaccgattttgaatatgagctgcagatgtcgcagacgaatcagaggatgaagcctgatatagagaccatgtttctgacaacaagtatagaatattcttacttaagttcgactacagtgcgggagattgccgcttttgggggagacgtatcacagtttgtgccggaagccgtcgagatcgcactcagagaaaagatgaaagaaaaaaggagagtgtaacaatgagcagccgtattgaacagatcattgaagaaattgaagaatatatagacagagattgtaagtttcagccgttgtctacaacaaagattattgtaaataaggaacatctggatgaattacttcgcgaacttcgtatgaagacaccggatgagatcaaacgttatcagaagattattgcgaacagagatgcgattcttgctgatgcaaaggcaaaagcagatgcaatgatcgaggaagcccaggttcagacaacagagcttgttagtgagcatgagatcatgcagcaggcatatgctcaggcaaatgagatcgtaactcaggcaacagcacaggcgcaggagattcttgataacgcaacaatggatgcaaatacaatccgtgttggtgcaatccagtatacagatgatcttcttgcaaatgcagaaagcattatcggacatactttggacagttatacaacaaagtatgacggattgatcaattctttacaggagtgctacgatacagttcgctctaaccgttcagaacttgaagttccatccgatgacggatattatgatgagaatggacagggagacctgaggtagtcattacattgtattataaaaatttcagatagagaaatgtcaaaagactgactgccagtgcggcggtcagtttttgtattatataagaagaaagtttaagtcctgtaccggcaatcatggattgtgtctgggcaacggaacaccatccaccaaaagaggtaagtgcgagaagcaacggataaagaacctgggggtgggaaagactttgagacaggagaagaattccgtttgtcatctcaagagaagatttcaagagaagaaaaccaggtgaacgaatcggcagaagttccaataatgcaagaagtacagaaaagatcatcaggtaacctccgacttttacaagcgtttctgaactgttcaggatacaggattctaacacggaaaaattcattttgtgcgttagtggttttgaaaaaatggaattttcctgtgtgaaaacttcggacatttccgggaaaatccaatctttattcttgatgaaatgtcttagaattcgttgaagaaagcttaagaggatcatagttccgaaaagaagcagtaaagcgggaatgcagaaagctttctgatgaattgtatttaaaacaagaaaagtaataatgaaagatggacttgcattattacagaaggacagcaggtaagaagcttcttcaagagaaatttttccttgaagaagaaggtcggcaatgatttttgcacccattggataaccgcataaaaagccggacagaacggcgaaacttccatagaaggaagttccaaagagcagatggaaaggacggaaaagcagacgggagacaacagcagcaccatctgttttcaacaaaagtcctgtgacaataagataaggaaaaagggtcggtatcagaatctgataccagagaagcaggccatcacaagctccctgaaatacagtttcaggaaagagtagcatcgtaaaaaacagtgaaagcagtatgagagccagaagcataggaaacctccttttacaaaaatattctatgaaaagaaaaaagaaactataccggagctatggaaatatgatatagttaaatgtaaagtattttgatcttgatatcgcaaaggagcaaacaataaatatgaatttaccaaaagtatttgaagagaaaatgaaggatcttcttggttctgaatatgaagcatatacggcatgttatgatgaaccgcgtcactatggtctgcgcgtgaacacagcgaagatttctgtggaagatttcctgaagatcgcaccttggccgttagagccggttccgtggatccataatggattctattatgacggagataatatccagccgtcgaaacatccatattatttcgcaggactttattatctgcaggagccaagtgccatgacaccggcagatcgtcttccggtagagcagggagaccgtgtgcttgatgtctgtgcagcacctggaggcaaggccacagaacttggggcaaagcttggaggaaccggtgtactggctgcgaatgatctgagcagttccagagcgaaggggcttttgaagaatcttgaattatttggaatcggaaacgtgctcatcttaagtgaagagcctggaaagcttgtttcttatttcccagagtattttgataagattttgatcgacgcaccttgttccggggaaggcatgttccgtaaagagaaaaagatggtgaaagcatgggaagaacatggaccggagtttttttcaaagatccagagaagcattgtgacacaggcagcccagatgctgcgcccgggtggaatgctgctttattccacctgtacattttcaccggaagagaatgaacagacgattgaatatctgcttcaggaatacccggaatttaagatctgtgagatggaaggttacgaaggatttgcagatggaatgccgcaggtgacagaaagcaagaatccggaacttgaaaagacggttcgtattttccctcatcgtatgaagggagaaggacatttcctcgcacttcttcaaaagggtgaaaaacaggaagaaggaaagagacttccggagagtgggaagaacaagaagcttccggaagaactggaagaatttcttggtcatattgatcgaaaattcgattcctctcgcatggatctgcgtggagagaaagtgtattatatgccggaaggacttccgacacttcgtggaatccgtttcttaagaacaggcctactgatgggtgaactgaagaagaatcgttttgagccgagtcaggcactggcgatgaatctgaaaaaggaagaatatgatcaggtgatcgatcttccattagaagacgaacgcgttatgaaatatctgaaaggcgagactttggatgtggaggatcttgtgaagccgaaagacaagggatggtatctgatctgtgtggatggatatccgcttggttttggaaagcttgtgaatcagatgcttaagaataagtaccttccgggatggcggtggaactcatgaaactgagactggataaatatctggcagacatgggaatcggaacacgtacagaagtgaagaaagcaatcacaaaaggacaggttcgagttaatgaagagacggtaaaacgtccggaaatcaagattgacacagaaaaagatcatgtgttttaccagggacagatggttgcttatgcagaatatgaatattacatgttaaataagccagccggggtggtttctgcaacggaagataaaaacgacagtactgtattagatttgattgatgaaaagcagagaaaggatctctttcctgtcggaagattagataaagacacagagggacttttactgatcacaaatgatggcgaactcgcacatcagcttttgtcaccgaagaagcatgtagataaagtctatttcgccagaatcgatggaaaagttacggaagaagatgtgagaagatttgcagaaggacttgaaatcggggaagagagaccgacacttccggctcatctggaaattctgaaaagtgaagagatttctgaaatccgactgacaatcagagagggaaagtttcatcaggtgaaacgaatgttccatgtagtcggaaaagaggttatttatctgaaacgcctgcagatgggaagccttgtacttgatccgcggcttgcattaggagaatatcgagaattaacaggacaggaactggaagcattgcgtgactgttcattattacgttaaacagggagaaagcatgaaaggaaattttttaccaattaccagagaagagatgaaagagagaggatgggatcaggtagattttgtctatgtatcaggagatgcctatgtcgatcatccatcttttggtcacgcaatcattacacgtcttctggaatccagaggatatcgtgttgggattattgcacagccggactggcgtaagccggagagcgtgcaggtgttcggagaaccaagacttggatttcttgtctctgcaggaaatatggattctatggtaaatcattattctgtatccaaaaagagaagaaagacagacgcctatacaccgggcggcgagatgggaaaacgaccggactatgcctgcgtagtatatggaaatctgattcgtcagacttataaaaagacaccgatcattctgggcggtatcgaagcaagtcttcgaagaatggcacactatgattactggtcagacaagctgaaacgttctgtactgctcgattcgggtgcagatgtgatttcttatggaatgggcgaacattcaatcgtagagcttgcagaagcactggatgccgggataccggttgaggatatcacgtatatagccggtacggttgtaaaaacgaaatcattagacagtatttatgatgcggaaatccttccgtcctttgaagacctcaaagcggacaagatgaattatgcccgcagcttttacacacagtatctgaatacggatgcatttaacggaaaacgtcttgtagaaccgtattctgaacatctgtatgtagtacagaatccgccggcaacaccactgacacagatggagatggatgatgtttactcccttccttatcagaggacttaccatccgtcttacgaggcaaaaggcggagttcctgcaatcaaggagattaaattcagtctgatcagcaacagaggatgttttggaggatgcagtttttgcgcattgacgttccatcagggaagaattgtccaggtaagaagtcatgaatctctgattgaagaagcaaaagaaattacaaaagataaggactttaaaggatatattcatgatgttggcggtccgacagcaaatttccggcatccatcctgcaaaaagcagatggagcatggcgtttgtaaaacgcgtcagtgtctgttcccgtccccgtgtaagaatctggacgcagatcacagagattatgtcagtctgttgagaaagttgagagatattccaaaagttaagaaggtgtttatccgttcaggaatccgctttgattatctgctcgcagataagaagcaggagtttttaagagagttgtgtgaatatcatgtcagtggacagttgaaggtagcaccggagcatgtggcagggcctgtcctgtctctgatgggaaaaccggagcacaaagtctatgaagagtttacaagacagttttataagatgaatgagaaaatcgggaaagaacagtatctggttccgtatctgatgtcctcccaccctggttctactctgaaggaagcggtagaacttgcagagtactgtcgtgatcttggctatatgccggagcaggtgcaggatttctatccgacaccatcaactctttccacctgtatgtattataccggggtagatccgagaacgatgcagaaggtttatgttccgaagagtccgcatgagaaggcaatgcagagagcgttgatccaatatcgtaatccagagctgtatgatctggtgattgaagcacttcataaagcaggaagatctgatctgatcggattcggaccgaaatgtcttgtgagaccgagacagatgcgtggttcaggaaatgataaaaaagccggcagaaaggaaccgaaaaaaggatcaaaaggttcgaatggtcagaaaagacaaaacaattctgaatacagaggaagagttgaagggaaaaataagaagaaatctatcagaaatgttcattctaagaagaatagaaaataggtagatttaagtatctgacagacaggattcaagaaaggaagcaggatgaaaattgcaatcgtaaccggagcatcttcgggaatgggaagagaatttgtacgtcagcttggatatttttataaaaatctggatgagatctgggtgatcgccaggcgcaaagagcgtctggaagcgcttgcgaaagaaagcagagttcctcttcggatttttgcgggtgaccttcagaagaaaaaggtatataaggaattgagagatgcacttgagaaagaacagccggatttacgaatgcttgtgaattcagcaggatttggcaagtcaggaagtgtagaagagattttgtctgaaaaattccggatccagacagatatggtggatgtaaactgccggtctcttacaagaatgacattgctgtgtctgccatttctgcgtgctggcagcaggatcgtcaatcttgcgtccgcatctgcattttgcccacaaccgtatttctcagtatatgcggcaacgaagtcctatgtcttaagcttctccagatcattgggagaagaattgagaaaaaaaggaattgtcgtcacagcagtctgcccgggtccggttgatacagagtttttcaagttttccgggaaaccgcagaatatcttgaaggaactgacaatggcgaaggcagacagagtggttcatcaggcgttgaaggactgcagatccgggaaatcagtctccgtttatggaatcccaatgaaattaacttactttggaacaaaactgctgccgcatggatttctcgtgcgtatgcagcaaatatgaatttagaataggatgaaaaatgaagaaaatacaaaaaggaaaaccaggttatttgaattataaaagaaaagtggagattttaagaacggttatttattttgcaatcgttctggcaatttttgctcttggttactggcagacacatacgaggctgaatcttctgacagttgttgctatccttggatgtcttccggcatcaaaggcacttgtaggtgtgatcgcacgttatccatatcaatcaattgaactgtcacaggcgaaggaaatcgcaggaaaatcaaaacatttaacagtttgttatgatcttataattacaagcaaagagcatatcatgccaacagactgtatcgtaatttcgggacacaacatttacggatacacacattatgagaaagtaaatacagatgaacttggaaagcatatcaagacaatccttgcgcagaatcagtacacaggttttactgttaagatcttaaatcagtatacaccgtttctggcccgcgtggagggacttgaaaatattgctgtagtagagcaggaagatacgaaagcaagagaacaggaaatccgtaatcttattctgaatatatcaatgtaaagaggaaaagacgatgagagagatcagcatccagaaaaatgaggcaggacagcgcatggataaattccttgcaaagtatctcaataaagcgccaaaaagttttttctataagatgatgagaaaaaagaatattaccctgaatggaaaaaaagcagttggaaatgaacagctgaaacagggggatgtgattaagttatttcttgcggaagagacgattgagaactttatcgatcattcacagttttcgaagaaaaaagcgtcctctgcaagaaaacagacagcgggaaagaaggtacagttagatatcttatatgaagatgaggctgctgtatttatcaataaaccggtcggaatgctctcccagaaggcatccccgacggatacttctcttgtggagtattttattgattatctgttggaaaatgggaaaatcacggaagaagaactgcatacatttcatccatctgtctgtaaccgtttagacagaaatacaagcggaatcgtggcagcaggaaaaacactgcaggcattacagggattaagcgagatgttccgtgaccgtacacttaagaaatattatctttgtctggtaaaagggcaggtaaaagagaatcagaggattcatggttatctcgtcaagaatgaaaagacaaataaagttacggtgagtcagaaaaagccggctgaacagacaaaagatgggaaagaagcatcagcgatcgataccgaatacaaagtgcttgcacgaaatagagaaacaacacttcttgaagtgcatctgatcaccggtaagacacaccagatccgtgcacatctggcatccatcggccatccgatcgcaggggattacaaatatgggaaccggtcatttaacgatactttgaagaaggaatacggacttcgttcccagcttctgcatgcttaccgtctggaattcccggagaactgcgagggagatatcaaacagctttcaggaaagatcatcaaagcacctgtcccggccttatttgaacaaatctgtaaagcgcagggagtgatgtgagatggcaacatggaactcgagaggacttagaggttcgacactggaggaatttatcaatcattcgaatgaaagatacagtgagatgggacttgcactgatgcagaaaatcccgacaccgatcactccggtacgtatggataaagaccacagacagatcacacttgcgtatttcgacaaagcaagtacggtagactatatcggagcagtgcagggaatcccggtctgttttgatgcgaaagagtgtaatgtagataccttcccacttcagaatgtacatgagcatcagatggactttatggaaaagtttgaacggcagggcgggattgctttttttctgatctattatacagcaagaaatgagctttattatatgcagtatacacagatccgtaagttctgggaccgcgcgcagagtgggggacgcaagagtgtccggctggaagaattagatcctgaatggttttttcaactgaaaaatggctattttgtgccgtatctggatttaattcagaaagatttggaaacgagggattgacagaatcctacaaagtccgtataattacaaacaggttttaacgtggtagcacactaaagtgaaaaaccaagaaaagacaggaaggtgaacgagacatggagcagaagttacataccccggaaggcgttcgggatatttataatagagaatgtgccattaagctggcattgcagaaaaagctgaatactgtattgcatttatatggatatcaggacatacagacaccgacatttgaatattttgatgtattccgcaaggaaatcggttcgacatcgattagagatctttataaattctttgatagagaggggaatattctggcgttgcgcccggatattacaccgtccattgcaagagcagtagcaacactgtttgagacagagaattttccaattcgtctgtgttatgccggaaatacatttatcaatcattccagttatcgtggacgcctgaaagaaaatacgcagcttggtgcagagctgatcggtgtggattctatcgaggcagatgcagaaatgctcgcaatggttgtggacggacttaagaaaaccggactaaaggaattccaggtaagtatcggacatgttgattttattcagagtcttttcgaggcaacgaatctggaagacgaacaaaaagaagagatccgtacattgattgcgaacagaaacttctttggtgtggaagagattctcgatcattatgagattgccgatcaggtgaaagaagcgttccatcagcttccggaactgacaggtggaccggagattcttgcagatgcaggacgcattgctccgggtgaagcagcaagacttgcggtagaacgtcttcgccagatttatgatctgctgaagatttacggagtagaggatcatgtaacttttgatctgagcatgagtggaagttatggatattatacaggaatcattttccgtgcctatacttatggtaccggagatgcagttgtacgtggaggacgttacgaccaccttcttgagaagtttggaaagaagacaccgtcgatcggattcgcaatcattctggatgaacttatgagtgcactggatcgtcagaagatcaaagtagagacaggacaccgtaatctgcttgtttatacggatgcaacggaacagtgggcaatttctcttgcgaggtcatttcgtgcaaaaggaaaaaatgtcgagatgatgaagagaaactcctgggatgaaagagagacttttgaagcgtatggaaagcgttcttctgttgcaagtatgctttacttaagagaggaccggaagattgaagtgatcaatcttcagacaggagaagagaagctggtcaatacaaaaaagaaaacaaagcagcaataaaggagcagatcaatgagatatttaacatttgcccttacaaagggaagacttgcaaagaagacactggagatgctggagcgtcttggaatcacatgcgaggaaatgaaagataaggattccagaaagctgatttttgtaaatgaagaactgggattgaaattctttctcgcaaaaggaccggatgtgccgacttatgtagagtacggagcagcagatattggagttgtcggaaaagatacgattatcgaggagggacgtaaagtccatgaagtcctggatcttggattcggaaaatgcaggatgtgtgtgtgtggatatgaagaggcagcagaaaaactgaaacatcatgaactgatccgtgtggcaacgaaatatccgaatatcgcgaaagattatttctacaacaagaaacatcagacagtagaaattgtgaaattaaacggctcgatcgaacttgcaccgattgttggcttatctgaagtcatcgtagatatcgtagaaaccggttctacattgaaagaaaacggactggtcgtacttgaagaagtgtgcccgctgtcagcgcgaatgatcgtcaatccggtcagcatgcgaatggaaaatgacagaatcaaagagctgatcacaaatttaagaaatcttctgagggaggaatagacaaatgcgtatagagaaactgaatgagaatacgaagaagaatcttctggatgaccttttaaagagaagcccgaataactatgggaagtttgaagcaagtgttcagaaaatattgaatgcggtgaaagaaaagggagacgaggctgtatttgaatatacagagaaatttgatggagtcagactggacgcagagcatcttcttgtaacggaagaagagatcgcagaagcatatgagcaggtagatgatgaactgatcgctattatcagaaaagcacttgtgaatatcagagactatcaccagaaacagatgcagtacagctggtttgacagtaaaccggacggaacaattcttggacagaaagtgacagcactccagagagtcggtgtttatgttcctggcggaaaagcagcttacccatcttctgtacttatgaatatcatgccggcgaaggttgcaggtgtagatgagatcatcatggtaacacctccaggaaaagatggaaaggtaactccgacaacactggttgcggcaaaagaggccggtgcagataaagtttacaaggttggcggagctcaggcaattgcagcacttgcatatggaacagagtctattccgaaggtagataagatcgtaggacctggaaatatctacgtagctcttgctaagaaagcggtttatggattcgtaagcattgactcaatcgcaggaccaagtgagatccttgttcttgctgatgagacggcaaatccacgtttcgtggcagcagatcttctgtctcaggcagagcatgacgagatggcatctgcaattctggttacaacaagtatggaacttgcagagaaagtatctgcacagacagatgcatttgtaaaagagctttccagaggcgagatcattcagaaatccctggataattatggacatattctcgttgcagagacaatggaggatgcaatcgatgcagcaaattctattgcttccgaacatcttgagatcgtgacagcgaatccgtttgaggtgatgacaaagatccgtaatgccggagctattttcatcggagaatattccagtgagccgctcggagattattttgcaggaccgaaccatgtccttccgacaaacggaacagcaaaattcttctcaccgctatctgtagatgattttattaaaaaatcaagcattatttcttactcaagaaatgcacttgagaagatccacacagatatcgagaaatttgcagaggcagaacatctgacagcacatgcaaattcaatcaaagtaagatttgaaaaataagagaaaaggagctgtgagtgtgatgcagaacagaatcggaagctgcaaaagaaagacaaaagagacagatattgaactgacgatcaatctggatggacagggaaagaatcagattgatacaggaattccgttttttgatcatatgctggatggatttgcaagacatggattatttgatttaaatgttaaggtgcgtggggatcttgaagtggattcccatcacacgatcgaagatacaggaatcgtactgggacaggcaatcgcacaggcacttggagataaggccggaattaagcgatacggatattttgtactgccaatggatgaggttcttgctcttggagcagttgacctttccggcagaccgtatctgaactttcaggcagattttacagtaccggcgcttggaacaatggatacagagatggtgcgtgaatttttctatgcagtttcctatagtgctgcaatgaacctgcaccttaagatccttgatgcagggaataatcatcatatggcagaggctttatttaaagcattcggaaaggctctggatatggcggtatcagaagagccaagaataaaagaagtatggtctacaaagggaagcctttaacggcgtgacagaaggagtaagaagaaattatgtataaaagactgaccccttgtatttttatagaaagagggaaagcggtgcagtggttcgatgacagaactgtgatcgcagatgatgtgatggaacttgcacgccactacaatgaaagaggagcggatgaactgatcattttcgatctgtcagactcagatgaagaacatgatgagacgatcaacctcctcaaacagatcaaccgtgcaatcagtattccaatggttgtcggaggaaacatcagacgtgcagaagatgtgaagaagattctttatgccggagcaaaacgtgcaatgctgaatttctccaaagcactttccattgaattaatcgaggaagtatccaagcgttttggaaaagagagaatcgctgtatcattaaatgatttcgatgcattgtttaaacagcagcatctgatcgaagcatatagtacagagatgatatttatgcatcgcctggatctgaattctgttgtaaatgttacagaaacgcagtgtgttgttgtcacggatacgatggatgaaaacgagatccttaatattttaaagagtgatggtgtaaaaggtgtatcaggaagattcatcagtcgtctggatatggactttaacaaatttaaagaagtttgtgcagaaaatggaattcaaatgacttcctttgaaagccagatggattttggtgagtttaaattgaattcagacggattaattccagtgattgttcaggattataagacaaatgaagtcttaatgatggcatatatgaacgaggaagcatttgagcatactgtgaaaaccgggcgcatgacttactatagcagaagcagaaaatgccagtggatcaaaggtgagacatccgggcatttccagtatgtgaaatctcttgcaatcgactgtgacagagatacgatgcttgcgaaggtagaacagatcggagcagcatgccatacgggaaaccgctcctgtttctatacaacaattgttggaaatgattacgatgccaagaatccggttcagatttttgaatccgtatatcagacaattgcggatagaaaagagaatccaaaagaaggttcctatacgaactatctttttgaaaaaggtttggataagatcctgaaaaaggttggagaagaggcgacagaagttgtgatcgctgcaaaaaatccaaatgtcgaggaagtgaagtatgaattatctgatttcctttatcatgcaatggttctcatggtagaaaaagggattacctgggaagacattacaggagaactggctgaccggtagaaaacgctgtatcagattttcctggaagaataaagcagaagaaactttcataaactagaaaaaaagaagatggagaggatctttcgtgcaggaaaaagaatcagaagtccgtaggcgtagattgtgggaagaaaatcgcagacgacagcggaataccggtatgataacaccggcaattcatccaagatatggtcgtttatatcgggaattatatccggatggtctggagcaaagtgcaggaaatggagcagaagatctggataagaaagaaaatagcagaggaagctttactaccagattgatcctgtccacttttctgtttcttgtgtttctttatgtcagtcagaacagtgtagaacttcaagggataagcagccatgagattatagagaagattcaggaaaaccatgatattttcttgatagactaaaagtgtaatcttgacacggaaacagtaggttgataaaatattattgacgtttattttatagtatatgagaggcgttgattggattcagcgcctttttcattgcatgagaaggaggaaatgagagatgattaaagtatggatagccggctcaaacggccagatcggccgagcgctgaacgacattctggatccattagagatcgaagtgctgaatacggatctggatgatctggatattacaaacacagaggaagttcttaacttcggtattgtgaaccgtccggatgtgattatcaactgctgcggtgttacagacaccgatctgtgcgaaaaagaaccagaacatgcttaccgagtaaatgcacttggagcaagaaacttaagtatcgtcgcaagaaagaatggcgcaaagatcgtccagctttcaacagatgatgtatttgacggacagagcaagaaaccgtatacagaatttgatgatacgaatccactgactgtttatggagcatccaaaagagctggtgagaattatgtgaaagaattcacacacaagcatttcattatccgcagtaactgggtttacggaaaaggtggaaataactttgttaaccgtgtgctcgaagtggcagaacagggaaaaacactttctgtagcaggagatcagtttggttccccgacaagtgccaaagatctcgcaagaatgatcctgtatctgatcagtacgaatgaatatggtacttatcatgtaacttgcagtggagtctgcaatcgttacgaatttgctcaggagatcttgagattgtcagggaaaaacgttgaattaaaggcagttccgacagaacagtcagacctttcttctgtcagaccaccgtatgcggtattggacaacttcattctccgtattattgatatgtatgatatgccggattggaaagagtcattagaagagtatatgaaagaaagaacggagaattagaatgaaaaataagaatgtgaaagatgaaaagaaagagaagaaaattggtctgacgaccaagattttcattgctctgcttttaggtgctgtttttggaattgtactttgttatctgattccagacagcaaggtaaaaaatgatattattgtagaaggaatcctctatgtgatcggacagggattcatccgtctgatgaagatgcttgttgtaccgcttgtattttgttcccttgtgtgcggaagtatggcaatcggagatacgaagaagctcggaacagtaggtgtcagaacattggtattctacctcgcaacaacagctcttgctgtaacagttgctttatcggttggtaatctgatcaatccgggtatcggacttgatatgagtgcaatcaagacaagtgcgtccacagttgagacaatggaagcaacttccctgacagatacaatcctaaatatcattccggacaacccgatcaattccctggcaagtggaacaatgcttcaggttatcgtatttgcgctgatcattggtgttatccttgcgaagatgggtgaacgtgcagagacagttgcgaacttcttcagccagttcaatgacattatgatggaaatgacaatgatgatcatgagccttgcaccaatcggtgtattctgcctgatcagccgtacttttgctacaatcggattcagtgcatttgttccgctggcaaaatacatgatcgcagtacttttggcacttgcgatccagtgtctgggagtatatcagattctgttaaagattttcacaggactgaacccgatccgcttcatcaagaaattcttcccggttatggcatttgcattctctacagcgacatcaaatgcgacaatcccgctttctattgaaacactttctaagaaagtcggagtttccaagaagatttcttcctttacgattccgcttggagcaacaatcaacatggatggtacttccatcatgcagggtgttgcagttgtgtttgcagcgcaggcattcggaatccatctgagtatggcagactatattaccgttatcggaacagcaacactggcatctgtcggaacagccggagtaccaagtgttggtctggttacactgacaatggtatttaactctgtcggacttccggttgaggcaatcggtctgatcatgggtattgaccgtatccttgatatgacaagaacagctgttaatatcacaggtgatgccgtatgtacaacaatcgttgcacatcagaataaagctctggataagaaagtcttttatgagacagagtaaaagtgaatagatagtatatgtactgtctatggtatagaatgatataagagaaacccctggtttacgtctggaatgatgtgaaacaggggttttatgatacggttgattagtgcataagaagcgatggaatggtataattctattattgatagattttaatagcaggaggtttatacaatggaacgagtagtaaattttttaaaagaagcagaaatatattatttggcaacagtggaaggagatcagccaagggtaagaccttttggaacagcacatatttttgaaggcaagctgtatattcagaccggaaaggtgaaggaggtttcaaaacagattcacgcaaacccaaaggtggaaatctgtgcatttaaaaatggtgagtggcttcgtgtagccggagaacttgtagaagatgacagaagagaagcaagacagtctatgcttgatgcttatccatctttacagaatatgtactcggcagatgatggaaatacagaagtattctatttaaaaaatgtgatagctacattttcatcatttacacatgaaccggaagtagtgaagttttaaggacaacataaaatggagaaaagtaagaagaaaaaaatatataaaaagatagatgtggtcagcttttataagagtattgttgatcaggacagggcatccgttgttatatgcaatcttaaacatgagattatttacatgaatccggcagctgttatcagttatgcgaagcgaggtggcgataaacttatcggaagaagcctgttagattgtcataatccggaatcaagggatagaatacagcaggtagtggattggtttgcagtagatgaaagccataatatcgtttacacttttcacaatgagaaacagaataaggatgtttatatggtggcactcagagatgagggaaagttgataggatattatgagaaacatgaatatcgaaatgcagagactatgaaacaatacgatttgtggtgatggagtaggcagaaaggaaaataaatgagaaaagcaatcgtatatgcatctgtacatcatggaaatacagaaaaattagtaaaaaacatagcagaagagtgccaagttgatttgattgatgctgtaaaacagccagatgcagatctgagtagttatgatatagttgggtttgcatcaggaatctatttttcaaaatttcatcagtcgatattggaatttgcagagaagaatctaccggacgataaaaaggtatttctgatctgtacttatggtggaagtgcgaattacaaatccatagaacagattttggacaagaagcgttctaaagtgataggaaaattcggatgcaagggctatgacacatttggtccatttaaactggtgggtggtattgccaaagggcatccagatgaagaagatataaaaaacgcagtggagtttgtaaaagtattatgaaaaactgaaggataagggcgagaatgtgtatatagattctcttacctatgagcagtttatggtgcttggtgatgcggaattaagcagaagattctccatgcaggatgaagtagagcagaaagaggaagtgaagaaagcattggctgcaggagttccgaaagcaacgattcttacttacttctatccggaggtttctgtggagaggatgagttcatatcggaagaagcattaaatgatatagcataggcacaggaaatgtggtatactgtgcctatgtaaaaaagaatgtgttttacaaatcggaagttggaggatacacgcatgaaaattgtaatcattaatggaagtgccagaaaaggaaacacgctgacagcaatcaatgcatttataaaaggagcatcagaaaagaatgaaattgaaatcattgaacctgacaaactcaacattgcaccatgcaagggatgtgatgtctgtcaatgctctaagggatgcgtcgataaggatgatacaaatcctacaattgataaaattgctgccgcagatatgattctttttgctacaccagtttattggtggggaatgtcagcacaattgaaacttatcattgataagtgctactgccgtggattgcagttaaaaaataaaaaagttggcacgattgttgtaggcggttctcccgtagacagtatccagtatgagttgattgataagcagtttgactgtatggcaaaatatctttcatgggatatgcttttcaaaaaatcatattacgcaacagccagagatgaacttgaaaaaaacaaggattccatgaacgaacttgaggggatcggaaaaaatttataaagcacgttccaaattcaagtttgtctgactcacaacaatttaatagcaaacaaatacaagcactttagccaatatggttaaggtgctttttttctgcttgcaccttgaaaggaggtagttgaagcataccacatcggggaaagcccgatttaatcattacaacaggcattgcctgatcataatatagatcaatcgtaactattcagtacagaaatatgcggtaccgcatatttcgtaagaaaacgtatattatgtaggagcaagcgcccatcagcgaagctgattctaatgcgcttgcggctcgcaactgtgaaggtactgaacagttacgagtaacttttaacagccagttagggatttatgatattgtggattttagaacttgtttcttatctttcggtactctctcggggaatatcctttcagcttgtggaaaagccggctgaaataaagctgattatcatacccgacgattttagaaatttcattgatggaataggttgttgtttcaagtaacatctgggcattgttaattcggattcccacaataaactgcattggtgtagaacctgtgcattttttgaagtttcggataaaccagctgacactcattccacgtgaggcagcataatcatctatgctaatattctggttataattttcactgaaaaaggtaactgcgttatccatctcgtgatccaggtattcatttttcgagatatgttccctggtcagttcccgatgaaagatgataagaagatgacggagcagaaggacaagcatttcctcataattatcttggcaacgctgaagttcgatgataatacgcttgaaaatctgttcgtattccatagaggttccgacctgaaatacacgctctttatccgggaatccatattgccgtaggatattttttacattgttgcctgtaaaatgaatccagtatacttctgtcttatcttttccataatattcatatttctgaagttccttcggtctgtacagtacaatattaccggcggggacaatcgtttcgttatccatattgtcaaaatgaaaatgcccacaaccagcagtgatatagataatctgataatccaggcgtccccttggacggtaggttggtaactttggatggctggaaaggcggtaagtaccgcaacttcctacaaccagtgggcgacttttgtctttgaaatccatatgggagtggtttaaataaccggtattcatatacatatggtagcacctcttttctttttttgttattgtatcatttagtgcatattttgtctaatccaattcatagacatgttttgcagattaggataagatatatatagcaaaacagagaagcgtaaacataaaagtaaaagacaaggtttgctgtggaaaaacaaagtgcaaaaaaatgtatatgtattaaaggagagttatttatgattgtaccacgttattatgaggatttaagcgtactgcatgaaaatacaatgccagccagagcctattttattccggcatcaaaaagaatggataacctggtggagcacagggaagagtcagaccgaatgcagttattgaacggaacttggaagttccagtattttaacagtatctatgatgttcaggaacccttctttgagaaagattatgatacagaaaattttgatgagattcaggttccgagtgtatggcagatggcaggatatgacacacatcagtatacaaatatcaggtatccgttcccatttgatccaccgtatgtaccacaggatattccatgtggaacatatgcacatacctttgtttatcacaaagatgaaaatgcaccaaaagctttcttgaattttgaaggggtagacagttgcttttatgtatggatcaatggctcttatgtagggtatagccaggtttctcatatgaccagtgagtttgatatcaccgacctccttcgggacggagagaacagcatagcggttctggtcatgaagtggtgtgatggttcctatttggaagatcaggacaaattccgtatgagtggtattttccgggatgtgtacattttgaaacgcccaaaacaggcaatcagtgattatcatattaaaacaagaattgaggatatgcttgcgaaagtagaaattgaaatgaaattctactctccgttaaatgtaaaaatttcgattgaagatagaaacggagcagttgtagcactaggaagtattgctgaagaaggaacagctgtattagaaatcgcaagtccggaactttggaatacagaaaatccatatctatataaactgattcttgaaacagagaatgaagtaattgtagatcacattgcattaagaaagatagagattaaagaccaggttatttatttaaatggacagaagattaaattccgtggtgtcaatcgacatgattctgatccggttactggatttacaatcaattcggaacagattacaaccgatcttacgttaatgaagcagcataattttaatgcgatccgttccagccactatccgaacgcaccatttttctatgaaatgtgtgacaagtatggattcatggtaatagatgaagcagatattgaagctcatggtccatttatgatctacagaaaagaagacaccgattacaatcggttcaaacgatggaatgagaagattgcagatgatccggtatgggaagaggcaatcgttgatcgagtaaaactcatggtggaacgtgacaaaaaccgtttctgtattgttatgtggtcaatgggaaatgagagtgcttatggttgcaactttgaaaaagcactggaatggacaaagaattttgatccagaccgtatcacacaatatgagagtgcaagatatcgtaattatgatgaaacatatgattacagcaatctggatgtgtacagtcggatgtacccagcgctttccgaaattcaggaatatctagataaagatggaagcaaacccttccttttggtagagtactgtcacagcatgggaaacggacctggagattttgaagattacttccagatgattcaggataatgataaaatgtgcggcggctttgtctgggaatggtgtgaccatgcgattgctcatggaactgctgagaatggaaagactatatatgcttatgggggcgaccatggcgaagaaattcatgatggtaacttttgtatggatggattagtatatccggacagaacggtacatacaggacttttggaatacaagaatgtttatcgcccggcaagagttatttcctataacaaagaaagcggagaactggtgcttcataactacatggattttgatgacttgaaagattatgtgaagattagttatgagctgacacaggatggtcttgtgatcagcaaaggcatacttccggagttttctgtggcaccacatggggaaggaaaaacaaacctgaagatcaatgttccagagaatgggaaatgttatttaaaacttatttaccatctgaaaaaagaattgccactgttggatgaagaccatattcttggatttgatgaaattgaggtaagtaaagaggatacaaaatgtaaacttgcagagaaatggataccaaaaacagtagtggactctgaattacaggtaaatgaaaatgatacacagattcatatcaaggggcgtgaatttgcttataccatagacaaacgtactgcactttttacagagatgaaatttgcaggtcgggaatatctgaaccatccgatggaattaaatatttggagagctccaacagataacgatatgtacattaagtctgaatggaagaaagcccactatgataaggcttacacaagagcctatacgacagaggttgtgcagggaaaacatggtgtgaagattacaagccatgcatccgttgtggcagagacagtacagaagatacttgatgtgacgattacatggaaaatagaagctgctggaaagattgatgcagatattgcagtaacaaaagatgatgaatttccggacctgccaagatttggtgtgaggatgttcctggataaaaaactttcagctgtaagatactttggaatgggaccacaggaaagctattgtgacaaacatcaggctgcgagccacggtttgtatcaggcaaatgtagatgatttgcatgaggattatattcgcccacaggaaaatggaagccattatgattgtgaatatgtagagcttaacaacagccgatatggaattgtggtctctgcggaaaatgccttctcattcaatgcttcttattatacgcaggaagaacttgaggagaaaacgcataattatgaactgacagaatcagatagtgtagtattttgtgttgactatgcactaaatggcattggttctaacagttgtggtccagttgtattggagcagtaccgatttgatgatgtattattccggttccagtttacactgataccgtatataaagggataataaagtttcatgtaacccgtaaacaaggaaagagagtctgattgttatgtaaagtccggatatacagagcaaccagacaaaaacagagaaaaaactagaattagacatcatactctgttagacatcttgaaattctaagtgcgatgaagatgaggagcaaagaaattcgatggaagaaaaaaagtatttgaaatggtataacaaaattggatatggatcaggcgatattgcaggtaatgtagtctatgcgttcctgacctcttttatgatggtctatttgacggactcagtaggacttgctgcaggtgtcgtaggtaccctgattgccgtatcaaaactatttgatggttttacggatatattttttggatcaatgattgacaaaacacacagtaaaatgggaaaagcgaaaccctggatgctatatggatatattggttgtgccattacgctgatctgctgttttgcagtaccagtcagcttgggaacaacggctaaatatgcatggttctttatctcttacacactgttaaatggtgtgttttatacagcaaacaatattgcttattcagcacttacgtcactgattacaaagaacagcaaagagcgtgtgcagatgggatcttaccgttttatttttgcgttttcaacaagtcttctgattcaggcaattacagttggatttgtagatatatcttaacgatgcaaggctgaactatgcatgccagcgtttggaaaatacgagtgattctattacaaaaatttgtctggatagtggatttgaaagtcagagaacatttaaccgagtatttaaagaaagatataaaatatcaccgagtgactaccggagtacatgtctgaaagatatgactgtaacaagcttagtaagttaacaattatataaaaagagaaaataggttgctttttttatcgtcaaaagatatgatgttaaaagtagcatttacaattttgtaatataaatgcataagtacaaaatacaaggagaaatccatgagaaaactagcattagatgatgatattttattagaaatcgagaaacctgcccgttacatcggcggagaggtgaatgcggtgatgaagaacgtggaagacatcgatgtgcgattcgcgatgtgtttcccggatgtctatgagatcggtatgtctcatttggggattcagattctttatgatatgtttaaccgcagagaggatgtgtggtgtgagagagtttactctccatggcatgatctggataaagtgatgagagaacagaagattccgctttttgcactggagtcccaggatccgatcaaggactttgatttcctcggaatcacaattcagtttgagatgtgttatacgaacattctgcagatccttgatctgagtcagattccactgcatgcaaaggacagaactttagatgatccatttgtgattggcggtggcccgtgcacatacaatccggagccgatcgcagagttctttgatatcttttatatcggagaaggtgagacggcttatgatgagctgcttgacgcttataaggaatggaaaggttcaggaaagagccgccgggagttcttagaacgtgcagcgcagatcgagggtctgtatgttccgattttttatgatgcagaatataatgaagacggcactttgaaatcatttacaccgaataatgaatatgcatcggctgtagttaagaagcagattgttatggatgtaacagatgcgccgtatccgatgaaaccggttgttccttttatcaaagtaacgcaggacagagttgttcttgagatccagagaggatgtatccgtgggtgtcgtttctgccaggcaggaatgctttaccgtccggtcagagaaagaaatgttgagcgattgaaacagtatgcgcatgatatgctgcagaataccggtcatgaggagatttctcttagttcattaagttccagtgattattctgaattgaaagaactggtaacatatctgatcgatgagtttaagaataagggaattaatatttctcttccgtctcttcgaatcgatgccttctctcttgatgtaatgagtaaggttcaggatatccgcaagagtagtctgacatttgcaccggaggccggatcacagagaatgcgtgacgtgatcaataaaggtctgacagaagaagtgatcttaaatggagccggagaagctttcgaaggtggatggacaaaggtaaaactttactttatgcttggacttcctacagagactgaggaggatatgaaagagattgctcaccttgcggaaaaggttgcccgtagatattatgagattccaaaagatcagagacatggaaaatgtcagatcacggcaagttcttctttctttgtaccgaagccgttcacaccgttccagtgggctccgatgtgtaaagcagaagaatatatgagacgtgcacatcttgtaaatgatgaatttaaagaacagttaaaccgtaagagtctgaaatataactggcatgatgcggaagttacggttctggaaggtattatggccagaggtgaccgtaagatcagcaaggcgatcgaggaggcatatcgtctgggatgtctgttcgattcctggacagagagtttccacaatgaactttggatgcaggcatttgagaacacgggtgttgatattgatttttacaatctgcgtgagcgtggagaagatgaattgttcccgtgggatttcatcgatatcggtgtgacaagaaagttcctgcgcagagaatgggatcgtgcgatggaagaaaaagtaactccgaactgccgtatgcagtgttccggatgtggcgcagcgaaatttggaggaggtgtctgttatgaaggcaagaattaaatttagaaaatatggttctctccgattcatcggacatcttgatgtgatgcgtttcttccagaaagtgatgcgtcgcgcggatattccgattgcattttcaggaggatatagtccgcatatgatcatgtcatttgctaacccgcttggaatcggactgacaagtgacggagaatattttgatattgaattaacagaagcagtcaacagtgcagatgcagtcagaaggatgaacgaagcctgtcagattgagggaatcgagatcgtaagcatccgtagaattgctgaggagaagaagatgaccggaatgacaatccttgcaggagcagattatctgacatctgtgagaaagggagcatttccggagggctggaaagaacgattttcagaatttatggaacagccagagatccgaatcgtaaagcagacaaaacgaagcgagaaggaagttgacattaaaccattgatctatgcatgggaactgcgaggcgattctgtttacctgaaagtggcagcaggaagtgtagagaatctgaaaccggatcttgtgatggaagcattttgtcagttcattggaattgaaccggacagcgtgaaattccagcatcacagactggaaatgtatacagatcgcagtgaagatggatccttgattccattagaggcaatgggtgttgatatgacaggcgatgaggaatgagaagaaacagatgaaacgaaaagttttgatagagaaaaaagaaaatcatgtgtggaccttttttctggaagaggatcagattgctgagattcactgtacaaagtccgacgaacaggaaaaggtgcatcagattggcgatatatatgtcgccaaagtacagaatatcgtacagaatataggggcagcttttcttgagatcgaacctggcgttaattgttattttgatttaagagatgcacagaatgcattttttacgcataagattgggaagaagccactttgcatcggtgatgaactggtagttcagatcagcagggaagctgtaaagacaaaggttccgacagtgaccggtaatattagtctgacaggcagatatgccgttttgacgcatggtaatacaagaataggtgtatcttctaaaatttcaaaaaaagacagggaagcctataaggagcgccttcaggaatatcagaatgaccagtatggtcttattatcagaacgaatgcaaaagatgctgcattcgaagatgtccttacagagattgaacagctgaaagcggaatatgaacatcttttaaaatatgctgcttccagagtgtgtttctcatgcctgaaatctgctccaccgtcctatattacagatctgaaaaatgtctatatggatggcatggaagaaattcttgtgaatgatgcagaaatatatgaaaagatttgcagctatttcaagaaagaaatgccggagaatctggaactggttcatttccatgatgacagtggttatccacttggaaagatttatagtacagaaacagcggttgaacatgccttagcagaaagagtctggctgaaacatggaggatatctggtgatccaggtaacagaggcgcttaccgtgatagacgtaaattccgggaaaaacgtccgtaaaaagggtgatgatgagtctacattgaagatgaatctggaggcagcgaaggaaacagccagacagatacgtcttcgtaatctgtctggaatcattctgattgattttataaatcaggatgaggaaaagaatgaggaaactttattaaaagaattccgatattttcttgcgaaagatccgatccagacaacattagttgatattacagcacttggacttgctgaggtgacgagaaagaaagtgcgtaagccgctgcatgaagcagtaagagagatagaatagcagatgcatttgcaggcagagacaacaaaggagatgctaatataatgagtaagaaagaactgaaaacaaatgcaatgagaatcttggacaggaacaagatcccatatgaatatgaaacctatgagtgtgatgaatttgtcgatggaatcacaacagcagataaaatcggtcttccgcatgaacaggtatataagacgcttgtgacggttggaaaaacaggcgagcattatgtgtttgttattccgattgcggcggagcttgatctgaaaaaggctgcgaagtcagtcggggaaaaatcagtagaaatgctccatgtgaaggatattactgcggtgaccggttatgtgcgtggtggctgtacggcaatcggaatgaagaagcaatttccgactgtgatcgattccagtgcacagcatcaggaatacatttatgtaagtggcgggaagattggaatgcagattaaattgaaaccggatgatctgaaaaaggctgcacgggcggaatatggagagatcacgttttaattgattattattaatgtttataagaaattcctataagttttcttatttaaaagtttacaagaactgtggaacactgtataataatgaaccgataatgcagaaagcagtattgttactgttcacgggaaactcgaaacagcaacgcagaattacattggaggaatagcaagaatgaagaaagtagtaaagttcggcggaagttctcttgcgagcgcagaacagtttaaaaaagttggaaatattatccgtgcagaagaatcaagaagatatgttgtaccatctgctccgggaaagcgtttttcagctgatacaaaggtaacagatatgctctatggctgctatgcggctgctgagaatggcgaagatttcacagagaagcttgcagcaattaaagatagatatcaggaaattattgatggactcggtttaaagttctccctggatgaggattttgaagtgatccgcaagaacttttctgaaaaagtaggaagcaattatgcagcatccagaggagaattcctgaatggtaagattatggctgcatatcttggatttgaatttattgatgcaacagaggttgttcgttttgatgagaatggagatttccagtccgagatcacaaatgaaattatgtctgcacgacttgaaaaggctaagaatgctgttatcccgggattctacggagcaacagaggaaggacgtgtagttacattttcaagaggtggttctgatatcacaggttctcttgtagctcgtgcagtcaatgcagatctttatgagaactggacggatgtatcaggattcctgattgcagatccaagaattgtaaaaggatcaaaatcaattgagacaattacatataaagagcttcgtgagctttcttatatgggcgcaagtgtccttcatgaagatgcgatcttcccggtaagaagagcaggaatcccgatcaatatccgtaatacaaatgcaccggcagacaaaggaacacttatcgtagaagcaacatgctgtcagccgaaatatactattacaggtattgccggaacagacggatttgctgcgatcacaattgaaaaagcgatgatgaactcagaagttggtttctgtcgtaaagtacttcaggtatttgaagacaatggtgtttctattgagcacatgccatctggaatcgatacaatgacaatctttgtccacaaagataagtttgaagagaaagaacagcagattcttgcaggaattcacaaagcggtagatccggatcacattgagcttgagtctgatcttgcactgatcgcgatcgtaggtcgtggaatgaagtctacaagaggaacagcaggaagaatcttctctgcacttgctcacgcatacattaatgtcaagatgatcgaccagggatccagtgagcttaatatcatcgttggtgtacgtcatgatgattttaaaaatgcgatcaaagcattgtatgagattttcgtactgacacagatttaaaaccaagaaaggctgaaaagagatgaatatcttattttttctgaaaccgaagagtgaggttgcttttatttatgattacagcacattacgtcaggttttggaaacaatggaatttcataaatatgcatctattccaatgctgaataaggcaggggaatatgtcggaacaatgacagaaggagatatcctctggggaatcaagaagtatacgaatctgaacctgaaagaggcagagacaatttttatccaggacttcccacgaaaagcagattatgaggctgtatcggcagatgctgacatggaggatcttcttcagaaagcgatgaatcagaattttgttccggttgtggatgaccagaagaaattcattggaatcataacaagaaaaagtattattgaatactgttatgaaaaaataaaaaaattagatgaaccctattgacaaatctaaatttgcaagttaatatatatgagtatgccgcacaacgaggtatttaagttctgatttcagacaccatagttggcgagtaatgataataggaggtgccatatgtacgcgattatagcaacaggtggtaaacagtacaaagtagctgaaggcgatatcattagagtagagaaacttggggtagaagctggtgagacttatacatttgaccaggtacttgcagttaacaacgacaagatggttgttggtaacccgacagttgaaggtgcaacagttacagcttctgtaatcggtgacggtaaagcaaagaaagttatcgtttacaagtataagagaaaatctggataccataagaaaaacggtcacagacagcagtacacagaagtaaagatcgaaaagatcaacgcttaatctgtttctgatgattaaggtaaccatttataagaccgaacggcaggaatatgttgggtttgatatggagggtcatgcgggatatgcagaggccggtgaagacattgtctgtgccggagtatccgctctcgtgatcaatgcgctgaattcaattgagcgttttacagatgatgagacaagctgcgtttcggatgaagataccggaagtattgagttccgttttgacggaataccatcacatgatgccacattattgctggattccatgattcttggtctggaagagatagaagacagcaatgactacgagaaatatatcgacataattttcaaggaggtgtaattaccatgatgaaaatgaatcttcagtttttcgctcataaaaaaggagttggttctacaaagaacggtcgtgactccgaggcaaagagactgggcgctaaaagagcagacggacagtttgtaaaagctggtaacattctttacagacagcgtggaacaaagatccatccaggacttaacgtaggacgcggtggagatgacactctgtttgcacttgtagacggtgtagtaagatttgaaagaaaaggaagagataagaaacaggtttctatctatccagtagctgagtaatcagttttggctggaaagttccgacggaatcttttcactcgcatacatggcaaaaggaagcctcagacgttttttaaggtctgaggctttttctttcaaagaaatcttttattgtcagatgatgaagaaatttacgcatatatgatgtgaataaagatacagaaacagttgttgatacaaattaagaggagaataatatgtttgcagacagagctaagatattgatccgttccggtaaaggcggagacggtcactgcagcttccgcagagaactgtatgtaccaaacggcggaccggacggtggagacggtggacacggcggagacctgatcttcgaagtagatgaagggctgaatactcttgttgactacagacataagagaaaatttgctgccgaagatggggaacagggcggaaagcgccgctgtcacggtaaggacggaaaagaccttgttcttcgtgtgccggaaggtacagtaattaaagaatctgttacaggaaaagttatcgctgatatgtccggagagaacagacgtcaggttgtcttaaaaggcggaagaggcggacttggaaatcagcattttgctacttctaccatgcaggttccgaagtatgcacagccgggacagccggcaagagagctggaagtgaatctggaattgaaggtgattgcagatgtgggtctgattggtttcccaaacgttggtaaatctacattgctttcccgtgttacaaatgcggaaccgaaaattgcaaactatcatttcacaacattgaatccgaatctcggtgttgtcgatctggatggagcaaagggattcgttatggctgatatcccgggactaatcgagggtgcatccgaaggtgttggtcttggacatgagttccttcgccatatcgagagaacaaagttaatgatccatgttgttgatgcagccggaacagaaggacgtgatccggttgatgatattcataagatcaatgcagagcttgctgcttacaatccggaaattgcggaacgtccgcaggtaatcgcagcgaacaagacggatctgatctatgatccggaagatgatccggttcagcgcctgaaagatgagtttgagccaaagggaatcaaagtatttcctatttccggagctacaggaaaaggaatctccgatcttctctactacgtaagtaatgagcttcagaagctggatcagaaaccggtagtattcgagcaggaatacttcccggatgatgaactgatctatgaagatcttccttatacggtagaacaggcagatggaatgtatgtagttgaaggtccgaagattgagaaaatgcttggatatacgaatcttgattcagagaagggatttgcattcttccagaagttcctgaaagattcaggtattcttgaagatcttgagagagctggcatccaggaaggtgacacagttagaatgtacggacttcagtttgattattataaataaggagaatattatgactacaaaacagagagcctatttaaaaggacttgcgatgacaatggatccgattttccaggttggaaaggcaagcatgaatccggggcttacggaggcaattgccgaggcactggaagcacgtgagctgatcaagatcagtgttttaaagaactgcatggatgatccgagagaaatcgcagagacacttgcagagagaacacagtctcaggttgttcaggtaatcggaaagaaaatcgttctttacaaagaaggaaaagacgataaaaagaaaattcagcttccaaaataattattttttcagcttctgagttattatatgattcggaagctgaatttgaatataggaaactcgcagagcgtgttttccatagtagaaaaggaacaggtatagacaatgaagattggtattatgggtggtacatttgagccgattcatatcggtcatcttcttcttggtgagtttgcttatgaagattttggacttgatgagatctggtttttaccgaatggaaatcctccacacaaagagacactcgatacagaagaagcaatgcatcacaggatcgagatggttcgtcttgcaataaaaagtaatccgaatttctcattgaatctttcagaagcggatacgaagaagcattcttatacgtatcagacaatgaggcattttaacgagatctacccaaacgatgaattttattttattctcggagcggattctctgtttgcttttgaagagtggaaagatttcagaaaaatttttacgacctgtacgattcttgcagcaatgcgtgacgacaaagatgcttcagcaatgaagggacagatacgatatctcacggaagcatacggagcgcatatagaactgcttcgcgcaccgttggtagagatttcctccactacaataagagaaagggcagcaaagagactcagcgtgcgttatatggtgcctgatgttgtcgcggattatatcaaagaaaagaatctatatatttaaagcatattttatctgcacttgtcaaaatggtggtgtggagtgaacagtaaccagagaggagacagaacacgattatgaaagaagctttcattaacattagaaaacaactggaaaaaaagctgaaaaaagatcgttttgaacatacaatcggagttatgtatacagcagcatctcttgcaatgcgttatcatgaagatatcgatgatgctatgatggcaggacttctgcatgattgtggaaagtatggttctgcgcaggaacaggttgagagatgtcaaaaacacggtattctgcttacacaatcagaacttgagatgccggcattggtccatgcgaaactgggagcatatttcgcggagaaagagtatggtgtgaccaataaaggcgttttaagtgcaattacatggcatacaacaggacgaccggagatgacaatgcttgagaagattatttatattgctgattatattgaaccgaacagaaagataattcctggtcttcaggagatccgtgaaactgtgtttgtcgatattgaccatgcaatctgtctttgtgcagggaatacggttaattatctgcgtaagaatggtaagccggtagatccgatgagcattgaaacttatcaatattatagcgacaaaggagaataaaagatgaatcagtcaaaagaaatggcaaagctggcatatacagccctcagtgataaaaaaggagaagatatccagatcatcgatatctcaggcgtgtctgtacttgcagattatttcctgatcgtaaatggaaacagtgacagtcaggtgaatgcccttgtggacaatgtggaggaagaattgcataaagcaggatattctctggtacagagagaaggaaatgcatccggaagatgggtgttacttgattttggtgatattattgtacacgtctttgatcgtgagaacagacagttctacaatttggagagaatctggaaagatggacatcatgtgtctgttgaagatcttgaagcataaatagtgagaattataaaaaactggcagaagagtagtggagtactacattctgccagttttttatactttgagttctaattaaaaatcctatatccagtaatgagatttaatacatacggataacaccgattaccttacccaggatagtgacatctgtaagaatgatcggatcatatgcatcattttccggctgcaggcggataataccttcttcacgatagaaagtcttgactgtagcgccatcttcaatcagtgcaactacctgttccccattttcagcagatggagtctgctcaacaataacataatccccactcagaattcctgcattgatcatactttcaccttgtacctgaagcataaatgtctgcttgtttggcatatattctacaggaataggaaaataatcttcaatattctgttctgcaagaagcggttcgccggcagcgacacggcctatgatcggaatattcaccatctctcttcttgtcaggttgaaattatcatccagaatctcaattgcacgaggcttggtagggtctcttcttatgtaaccattcttttccagcgtctccagatgcgaatgaacggaagaggtagactttaaattcacagcctcacagatctcacgaactgccggtggaaagcctcttgttaaaatctggtcttttatatattctaaaatctctttttgcttaggagtaatattcccttctgacatattgttccctccgaatctactataatcataagaacataataacacagcattttttagaaagcaaacatttgttgcgaaaatatgttcggttttatgaagtaaaatgcttgacaaacatttgttcgaacgatataatgaaaacataaaagaacagatgttcgatacatagcaataacagaagataggtatacagtaagcgaaaagagaggaaaaggattatgaaaaagtattcaggaaatcattcagtaaattcaaaaaagaaacatggtgttattcgtcattctggtttggtaatgtgcagtattctttttattctctgcagctgtatgtactttggaatgttccgagtttcggcaaaggaaatagatcaacagagaacctcagatgctattgagatttgttacacaagtagattaattgaaccaggtgacagcctttggagcattgcagaagaaacaattacagacggatatggctccgtaagcgaatatgtagaagcacttaaggtaatgaatcatcttgattcagatacgattcatgcaggtcaatacctgatgatcgcttacgaaaaattataaatggtatcaatatacaccctatgtattgatatatacactccctgaatccgaagaagattgctatctgttttccagaaatagcgctttaaatagcagcagatagtctcttcggattttattaacagaaatcaatctatacgacaaataccgatttttccaaaagatatagacgaaaaacagtacttatgttaaaatatataagaaatatggggttttcagtaaatttgaatctataaaggagcttttaatatggcagaaacttctaacagaaaaacatatcatgaacagacatatatagataacacattacgtcttagagaaattctgaagacattgcctccatttgcaaaggattattttcgtgcggtggaaccaacgacatctgcgcggaccaggatttcttatgcctatgatatccgtgttttctttcatttccttatggagaataatccggtttataaaaattatacgatcgaacaatttgaggtacatgatctggaacgcctggagccagtagatattgaggaataccaggaatatctgaaggtctataagaatgacgaagaaaaatgtatcacgaacacagaaaagggacttgcaagaaagatgtctgcgcttcgtagcttttatggatattattttaaacggcaaattatcagcaagaaccctacgttgcttgtagagatgcctaagctgcatgagaaagcgattatacggcttgatacggatgaaatcgcaatgctcctggattatgttgatcatggtggggataatcttacaggtcagcggaaagcatattttgaaaagacaaaaaatcgagatctggcaattctgacgcttctgcttggaacaggaatccgtgtatcagaatgtgttggactggatctccaggatattgattttaagaataacggaattactgtaacacgaaaaggtgggaatcagatggttgtgtatttcggtgaagaggttgagaatgcattaaagacgtatctttacacgaccagaaagcaaactgtaccactctccggtcatgaaaacgcactgttcttgtctacccagcgaaaacgtatgggcgttcaggctgttgaaaatatggtaaagaaatatgccagggaggtcactccgaataagaagataactccacataaactgcgtagcacttacggaacagcactttataaagaaaccggagacatttatcttgtcgcagatgttctggggcataaagatgtcaatacaacaaagaaacattatgcagcgatcgatgaagaccgacgccgtcaggcggcaggtgctgtaaagcttcgtgaagtataggaagtaaaaagaataagaatagataaaaaggatacagaaagaatgcactactgctcttctgtatcctttgcactatacattttaataaataagattaaacaatatttctggcttctttttcaatactttcttttaaaagaatatactgttcaattgctttcgctgtaccttgtactccgagttcagaactgtttaagcaaagctcatagctggctgcctcgccccatttcttgtttgtataataattgtaatagcttgctctctttttatccgtcttattgatcagatcttttgctttcgcatccgtaagatcaagtcttgttgctacacgacgaatacggtcttccatatctgcacgaatgaagatgctgacaacatttggataggattcaagtgcataatctgcacaacggcctaccaggacacatggtccctcatctgcaatctttttaattgcatcaaactgtgcaagaaaaactttgtgattgataggcatctccgtgtatgtgttgccggcatatcccatagaatatgtatccatcacaagagaatatagaaaactgttcgttggcttttcgtcatgagtctcaaataattcctcacagataccactttcttttgctgcacgcgcaagcatttccttgtcgtataatttaattccaaatgcctcggcaacgaaatgtccgatctcttttccaccacttccgtactgacgtccgattgttataatagtatttgtcttcataataagcaacactccttttcaagtctatgcgaaatcttatgtatattataaccaaaaagatgaaaaaagacaatgtcaattcactattttctacaccatttcttatacttagttttgttttcttaatttatttaataaatctttaaaatagtctggcaaaggtgcgtcaaattctatatattctcctgtagatggatgagtgataccaaggatttttgcatgcaaagtctgtccctggagtttataaggacattttgcaggaccataaatctcatcgcccagaattggatgtccgatactggacatatgaacacggatctgatgtgtccgaccggtttcaagctggcactcaatgtaggtaaaattaccaaatctttccaatacacggtaatgagtgactgcatgtcgcccatttggtgcttttgtactcatcttcttacgatctgtagggtgccgaccgatcggagcgttcacagtgcctgtatcctccttcagattgccatgtacgatagcgtgatactttcttgtgatagaatgttcttttaattgttctgcaagaatctgatgagctttatcatttttgcagatcagaagggaaccggttgtattcatgtcaatccgatggacgattcccggacggattacaccattgattcccgacaggttttctccacagtgatatagaaccgcattgaccagcgtatggctgtaatgtcccggtgcaggatgtacaaccattccttttggtttgttaacgacgagaatgtcatcatcttcatagagaatatccagaggaatattttcaggctgaatatcaagtggttccgggtcagggatctgaagaatgatagtatcccctgttgttaacttgtaattcgctttaaccggtaattgatttacaagaatttttttttctttaattaatttctggatataagaacgggaaaggctctctattctcccgtcaaggaatttatcgatcctttcccctgtaatatccgcattaaaatgaagttcttccataagctttcagaatccttcctgttgtgcgtttttatctgttcttaaaatttaaaaactcaaaatcgttgtcgtccttataataaaataaaatgagaacaacaaataaaatacatgcaattacaacatagcagtctgcaacattaaagattggaaaatcaatcagtcggaaatagaaaaagtcaacaacataatcaagtttcacacgatcgatcatatttcccacagctccggatgcaagcagtacagcacagatacgcagtggtctgtaatgtggtgtaaatggcatcttctggtacagatacaaaatgacagcaagtataataatacctccgactacaaacacaatctgtcgattctgcataataccaaatgcagctccgcggttctcaagatagcgaagttcaaaaactccggaaatcaaagagaaagactcgagacggcgtaagatagtagatgcaagatatttggtccattggtcaagtgctaatgtgagcagaaacccaatggcagcgaaaagataactctttgtctttgtttttgtattattcatgagtcgataagctcctcttttctaagctttttagattatacatatttctgaatagttacactgatccgattctttttagtgagtttccccgcttcctcaaaacggaacttacctaatccgcgtacagagataagatctccttcttttacctgatatccattgcttgtaatcaatttgccgtttacaaagacctttgcgccttcaatgagtccggatagtttacttctggaagaagaaaatgcaagtggaagtaggctgtctaagcgaacagatgaaacagttccttttatctgctggaaatcaggtgtgtagtttatcatatctaagttgatgacagaactatttataacagtgtggcgaacccgggttaagtcttctgttacaacagatacaaggtccttattgataaaaagaagtgctgaatcttctgtcacaagaatatctccggtttttgaacggtcaatcccaagatttaatatggaaccaagaaaatccctgtgagtcaggtcttcggaaaatcttttattttttggttctattttcacggcacaaaacggataatcaatctctttcggagtaatatcagataccccataacgcaaagaaagagcctcagggataaatgcagccatctgacgctccgccatatcatacccgccaaagaggacatatcttgaataaagcttgttctttggcagggtatgcaggatattctgatcattcaggttaagaaaatccgaatatgtaacaatttcacgttcaaaagcaattctggaaagttcaataaatctgtgttccaaaagctttgtttcttttttctgattttcttttatcataataattctaaaatccagttcctatagttgaagttaaattctagtatcttccacgaacacttggtgtttccatagatccactgagaagatcctgaagatcaccggaaatatcaacatttgtaggtgtaacaaggaagatatagctggaaatcttctgaaggtttccgctgatcgcaaatgctgctccggaaataaaatcaataattctctgagcaatctcaagatccataccttctaagttaaggattacagtacggcctgcaagtaatgtctctgtgatctcacgggaatcatctacagaagttggttttacaacgcatacttccatgtttccgccgtgttttgcagcaggacgcattggtgtaaccttgctggaagcagaaggctgaaacttcttatcttcatcagcatcaaagtcattgaaagattcctctttattattcttcttaccgaagaaagaacgacgcggtttttcctcaaaatcaccgtcatctgcaaaatcatcatcatcataaaattcatcgtcatcataatcgtcatcatttaacttcatgatgtcaagaaatttatcaaatacacccatttttacactcctatcttgtcccctttttcaggtggcgctcttttttattcatacgatccaacgaaaaaatgatactattcaattactgttcaaaaatattgtaaacagtaactcattcatcaggttaataaattaagtcagatattatagttccttgcaccaaagataccagttccaactcgaaccatagttgctccctcttctatggcaacctcgtaatcattggtcattcccattgaaagtatgttcacataaacattatcaatgtttttctcattaatgtcaacagataatttatgtaaatttgcgaaaatttgacgattttcttccgggttatcgacaaaaggtgcaattgtcatcagtccgcagaccttgatatgttcgaaatttgcaatcttttcaataaacgggagaacttcttctgttttaagtccaaacttactttcttcctgagcaacatttacttcaattaaaatattagctgtaagattatgttttgcagcttccttttcaattgtctctgcaagcttgacagaatcgacagagtggatcagatctactttatcaataatatattttaccttattggtctgcagatgtccgatcatgtgccagtggatatcatcaggaagtgcatcgtatttggctgtgatttcctgcactttattctcaccaaacacacggacaccgagatcgtaagcttcctgaagcatttctatcggttttgtcttacttacggcgatcaatgtaacttcttcccgcttgcgtccggcacggtcacaggctgcctgaatctttgcttctacttcttttaactgtgtttctagcataagttatctctccttttttagatttgattatcctcttttggattttgtatccaattttcaaagggctacaaaatcaaatcactgaaatacaacatcatcagaggaaacaccggctccgttttgtacgatataatcgtaatttgaaagtccgtaagaatctccttcctgaacaatgtaatattcgtcgctttcacataaaatggatacttttttaaaaatagcgtatcctttattgatattgtagactccctttaatggcttttgggtatcaatcgtataagtatcagaagaatccggttttacaatcactgttccggatttcagctgatctcgacttaaataaacttctccatcatcggaggtgtcatagatatcaacagcctgaaatgaggcagttccttttgaatccaaaaccataacaccttctaaagagctgttacctccgtttgtaatgtaatcatgaggaattacaaagaactgctcttctactacggaagattttggaatcttcaggccacactcatcttctaagataagttctatgttcagaaaacgctctgatgcataacgaatcatagagttgtcaaaggtcagaacaccatagaaattcccatctcgttcaagaacagagaaagcggaccacatcttttcactgtctttatctatgcggacctgcacattctgtaaattagatttctgaaattcttttgcggtgtcttcttttaaaggtatcactacggaccagttttcactggtaatcaagcggtaagccggtgaaccgcttgatatcttcatctgatcggtaagctcagttactttataatttgttttattaaaattatctgctgtaaaattgtcaacagttaaggactctaaaccatcaatcgtataggaaacaattccgtcctgtccggcagaagcggttgtgacagtttgtccgctgctctcaattacagatgcaagctgcgcagttttagttgtgcggtatgcattttgcaatgtattttgcagctcattctttaaggtatagatacttgaaaagttggaattgtcatagttttcattgaatgtctgaagttgtgtcacaagtcctgattgaacatcaggactaagatctgcagttgaagatgattccgtagatgaatcatcaaaattcaaagcattctttgaaattgcataaacaggtgcgccatatttgactttgctgtttccattctgataataattaatgtagccgcccgattctgcatttacagttgtttcctggcggatgatcaatccggtataggtattatccttcacaatactgccctcccgcacttcataaatagaaggcttatcttctaaaagatatgcggtaatagtaacaataagataaataaatacaactgcaaacagaaacattccaatattaaattctttttttgccttatatctttttatatttacagacttgttttttttctttgccaagataaaaatattacctcctgtcatttctgctttaactttgttagtatatcatttttttgtgtatatttccagcctttcaggggaagaatacatattaataaattaaagagcgttactgaaaacaggaaacggtaaaggagaatattacatgaaataagatagaaaaaaaccatgcggacagattaaaaatgaaagcttctaatttgttgttctgtgccacatggctttttcatatcggttattctttattctgttttagttgtttctccagcctcaagaagccggttcatctcctggtaaagaaaactcttatcttcagcccccataataatggaaatataaggattcttttccagatcttcgctataaaggatcacacagcatcctgcttcatctgtggtaccggtcttaccgccaaatacacgaattccttcaggggcattgatcttccctgcggaataatagttggttgggactacatcaaatgttcttgttgtaccatctgctccggtaagattcattgtataagaatccatggaaataatgtccataaatctctgatcctgaatgcaggcattaaagatcagatacaggtcatatgctgttgtatagtggttttcattatgaagtccgtgaggattcacgaaatgactgccagtggcaccaagagccttcgcttctgagttcataagctcagcaaaagcttctacacttccggaaatatgttcagcgatagcaacaccacaatcattacctgaacgaagtaaaagaccacataataaatcataaagtgtcactgtatcaccaggctgcaggttgcagactacttcatcagaggcaaagcttgaaacactgtcagaaacagttacaatgtcatccatattaccgtacttaaaagcaaggtatgcagtcataagctttgttgtacttgcaggatataatttatcataaagtttatatccatattcaactgttttatcatttagattgaataatcctgcagcatgaagagaatcctcatcatcaaatccagtgagagccacatcatcagcagcaacgcataaatcatcagcaaacaaacttccttggtataaattagagttataagtggatgtctcatatgtccggacaggatcaccaccatattctttgtaataccagactccgccgacagctccggacaatacaacaataagacatatgacaggaataagtatgcggctgacagaatgccgttgctttcttcgtcttctcttctttttgtatggtttactcatattatcgatacatctcccgccagtcaaggtcgcctctgtcaagagcaaggatcaatgcttcagcagttgcgatatttgttgcgatcggaatgttataaatatcacaaagcttaacaatgtcattaacatccggttcatgtgagtgaggtgtcagtggatcacggaagaaaatcaaaagatccatctgattgtgttcaatctgtgagccgagctgctgttttcctccgagatgtccagcaagatatttgtgaatgcttaagtttgttacattctcgaccagtataccggtggtttctgttgcatataaattatgcttactgagtatcccacggtatgcaatgcagaaattctgcatcaattttttcttcgcatcatgcgctactaatccgatattcatagtggtatcctctctttactgatatttattaggctgtaagcctacatttaatacaaaaccgattcccatgaaaaaacatactacggaagtcagtccataactgacaaatgggagggacaagcctgtatttggaaaaatcattgtagctacactgacgttaataaagctctggattccaatcagtgaagcaacgcctccgcaaatgatccgccctcctgtatctttggccttcaaaccaattaagatacactctatcacaattaataataacaaaattatgactccacaacaacccacaaatcctaattcttcaccaataattgcaaaaataaagtctgtttgtggctcagatacgaaatttccgttcttaacggatgttgttgcgtcattatcatacccttttccggtcagctgtccggacccaattgccataacggagtttaactgctggtaagattcgtcgtcggcatacttttcaggttccagccatgcaaggatacgttcctgctgatagtcttttaggaatggctggtttggctgtattgcaacaacaagcagtataatgatcgtcggtattgtgattacaagaacggttccaatgagtttgtagcttaatcctccaaggtaaagaaggacagcaaacaatgcggcaatacaaattgttgtagacaagtttggctgtttgtaaatcaatgcaagtgatggaaggattaaagcaattgcctgaataatcgttttgggttctttaatcttctgctctcgttccattaagaattttgcaaagaacagaatcataaggatttttgtgaggtcggaaggctggaattgtgtaaatccaaggttcagccatcttctcgcgccatttacttttgttccaaaaaccaaaacagccaggagcataacaatattcagagcataaagcggccaatataggtttaaaatccatttataatcaatgaaagagataataaacataacaatcagaccaagacaaacgcccataatctgacgattcattaaatcaggtcttgcacttcggaccataaggattccgaccagtgaaatcagagtgaccagaaaaaccagactgattttataatctctaatattataacgctgtttcaaattagtaaaaaatgatttcaatgtttttctcctgtatattttatatgtatatccgtgcgtgttattttgacatcaaattgttccggggagatttctatgtatttagaaatcgtctgatataaatccgatgtcagaaattctatcatatcgggtgtacattgaattctgtcagtaattagcaaatttcgcaacctgtcttttgcaattgtaacagaaggtacactcataatgtgacctcctagttcttatgaaaaagactggagagtttactgcgaagtccgggtttatgattaaaatcggaaatcgggacttcttctcctaacagacgtctacagatattctggtaacattttccggctaaggaatcttcgccgactaccggttctccctgattggttgcaacaacaacagactcatcatcagggatgactccaagcagatcaatcgctagaatctctgtgacatcttctacagacatcatatcacctctgcgaaccatgtcaacgcgcagacgattgatcagaagttcatttttccggattccggaagcttcaagtaatccaataattctgtcagcatcacgaattgaggaaacttcaggtgttgtaacaacaatggaacgctgtgcgcctgcaattgcatttttaaagccctgttcaattcctgccggacaatctaaaagaatgaagtcataatcatcttttagttcgtcaatcagttttttcatctgttccggtgatacgcttgtcttatcttttgtctgggcagatgggagcaggtacagattttcaaatcgcgtatctttgatcactgcctgtttcagacgacatttgctttcaatgacgtcaacaagattgtagacaatgcgattttcaagtccaagaacaacatccagatttcgaagtccgagatctgtatcaattacaagaactttttttcctgctgaagacagaccaattccaatattcgctgttgttgttgtttttccaacaccgccctttcccgatgtaatgacgattacttcacccatgttgaatattcctcctatttcccatgcttatgtctttccaaagatttattctatcagtggatcaaggtaaattctttttccgtcaacaactgcaatttgcggtccgttgatggaaaggctgtcctgatagatcagttgacgttttgcttcaatatctccgattacaagtcgctgtggctgcatggagagagcaatgataaaagcattcctgtcaccggcagctcccgcatgaacagatccatagagagtaccgagaatgataatatttccttttgcaactactttagctccgaattcaacatctcctaagatcacaatgctggattcggattcaagaagctgtcttcgctttaatgttccgcgatagaattgtccatctgatttttcacgttcagataaacactgtgctaccgctcttttgtagatcagttccttgcgttcatcatgatcaatgatacagataatctcaaggtttgtcgtctgcgtaataacctgtattaactgctcctcttcgctgatggaaagtgtccttccgctaaatgaaactgccatctttgcattcttgaagaaatcagcagattgtcggaatttctcttctacagcttttaaaagatccgggaatgggaggttggcattaagccgcagctctataccggaatgactgctttttattgttaccagttcactcatgatcccatcccctttcgttatcttaattaatcaccggcttctgcagttcctaaagaagaagcatatccttgaagcagttcatcggcggattctggattgaagtacacttttgtgatatctcttccaatttcagctgcataggtagacgcatatccatttgcaatgcggacagcaattgaaatttcaggtgaatctgccggcgcataaccgacaaacagaacattatctgcatgcatcttactatactgggcagttccggtttttcctcccatggaaatatccattccggcaaaggtggagctgctttttaccatgctttccattccattgtgtaccagatcccatgtacttgagctgatctcatccatctgatttacaacttccggagtataatctttgatcagttttccattcgaatcggttgttttgtcaataagagaaagactgtaaacagttcctcggtttgcaacggctgttacataacggttgatctggctgacagtatagttgttggtaccctgtccaatggcagatcgaacagagtcagaatcagaaatctgaggttgtgattcaggaatttcgattcctgacgtctggtcaaatccaaacatttttgcatattttgccagtttttcaaggccggtatcactgtcatagttaccattcgagtcttgtccaagacgataaccaacttcatagaagaaatcattacaggaatgctgcagtgcacctactacattcagacttccatgagcacttggataaatccagcattttggacttggtgtgatcttgtcaaatacacctgaacaactgatataggagtttccattaattaccccttctgtcagaccggctacagaagaaagcattttataagtagaacctggcgctgtcttctcctgggtcgctctgttgtagaaggtacgtgacatacccatgctcaactgcacataataagaacgatccattacgtttgagagacgattattgtcatatccaggataagaaacacatgctaaaacttctccggtatttggatttgttacaactgcaccggcagaacatggctcaagtgccagttcaccaggtgtaagctcaaggctttccagcttgctcttgatccaggaaaaagcatttgtctctccgttgagtaatccgttatatgtcgagtcatccataggaagaacaccctgttcatatacgatagcacaaacttgttcaccagtaacactacctgattttataagatatttgtagagaagtttgtcgaaattactgtcatctgccaaatattcttttaaatattttaaaatctcctgataaatctcttctgaactggaataagaactgcttccaagtttggaagtatcgatccagtttttagaaatcgcataattcaggtaagtatataaattgattgtctcatcttttgcccatgcaatataagtagcatcattcttatcaatctgatctgacataaggatgcctgtatcctttgtcagcagggtatcacagatgtaatccatatatgctttcatttcattggaaagatctgtatacgcgctggcctgtgagttctgaagttctgattcgagctcggaaatcgtcgccgttttcttttcctggaaaatggaataaacctgctgctcggcagtttttgcatcactgcttgaaaagtgcccggaatcgataacggcatttccaatcagattataatatgcatcgctgaccgggatgatcagattcttagagtcatctacgctggatgtatcgtattccagaacattctgtagtttggataaaacaattccggcaatcttctcttccagaagtttataagtactttcctgaagatttttatcaatcgtcagatatacatcatttccggcttcaggatctttccggctgacagtatcagttacacgtccgaggttatctacatacacggttctttcaccttttgtgccctgaaggacattgtccatgctttgttcaatgccggcctttcctacaatatcagacagagagtactttttcttttcatccttgtccagcgcatcgtattcatcctgggaaatctgtccggtatatccgataatagatgcaaaatacattccatcggtatattttcggatagaatcttctgaaatgtcaacaccggtaagaacgtccttattctccataattgctgctgctgtttcgtcacttacatcggatgcaagaactgtatcaatatactgctgatatgcatttaatgccattgcataacgcatgttgatgatctttaaaatataagcaggctctaatgtgctgtcatcaaggccatatccatatttttcatcagtacaaagataatgaatgatatctgctgcactttggttctgttgcttttctgtaagttcatctattgttctttttccatagacatctgcaataaaacggagcttctgggtatcgcttgactgtgtaaactgataggttccggaggaatccaggatgataccaaagcttgaaacaacagaatctccatttgattctacgatagaaagaacctgatccaggattttatttaatgccgcatttttttcagaacgtttatctgttgtgatggagttttcaacggttgacagattaattgtcacggaataagccagctggttataagccagcagatttccattacggtcataaatatttccgcgtgttgctgcaacagatgtcgtccggcggatagaatattcgtagttttcaagataatcagacccttttacgatctgaagatagaataatcttccgatcaggatggaagaactgacacaaaatataatgatcaaagtaacgagtcttgactgcatcaggtaagctccggcttctttcagacggtctaaaatatttctaaacaaatttacttgcactccttttttcttctgcttcaagtttgtggttaataaataaaatcagtgggtataatcccagtgtgatcacgattgtgtaaatcagttcaggaacgatgatgcggttgagataatataaaaagttaaaatcacttcgcaacatgaacatgagcaaataaatgatgataccgtagagaaattcgctgacagaaatcaaaaataacggcagcttgatatcttcatcaaaataaagctgttcaaataatccgtttacaaaaccgattaccaggtaaagtaatgcataaaatcccaaaattgtaccaaactgaatatctgtgataaggccggcaaagaaaccgaccagcattccttctttctgcccacgcataaaaccaaaggatgctgtgacaatcagaatcaggttaggtttaattccggcaagttccagatgattgaataaggtacactggagcagatatgctgcaagtacgatcagtacagttacagcaactcttttaaatttcattaatttcatgagtattcactcctattcgctctgattggatccaaccaaatccgctttcgttgttgtgataacaagaacttcctgaagatttttaaaatctacagccggtgtaatatatccggaacgagtcagattgttagagtcgaccgttacttcactgacatatccgatcaggattccctgcaggtatttatcactaatataagaagtgacgatctggtctccgacggaaaccgtattatcattgttttccatctgaccaaaacgaatctggttatcgctcataagtgacagatctccacttacgatacaacggtcagaagtagaaagtaccattgcacttacattacttgaatcatcgataatagaacggacttttgcccaggttggaccaacttctgtgacaatgccgacaagaccgcttccggccattacgttcatatctgtggcaataccgtctttacttcctttgtcaatggtaaatgtactgaaccagtttccggaatctttcccgattacatgcgcagcagtttttttgtaatccgcatagttcttgtccaactgatataattcctgcagtctctgaagctcataacgttcttgctgcagattgttattttctgtaatcagagagtcaacctgtttctgaagctttgtattttctgcgcgtacctgtttcagagtttggaaattgtctttcatatctcccatccagccaccaatctgattgattccctgctgaagagggataacggttacatttgcaacaactttaaatggacctcctactttgtctgaaaaggaagataacagcatcataaaaatgcagaaaacagaaagtcctataagtaaatatctgttcataacagaagtctgattcttcttttttttcatattatcttaaccacctataatcttcgtctaacatggagtaacttaattttctatacaaggtcttattcagtatgatcctctgcagacctttgacggcacagagttcagggtctgttttcatgtgaaccggcagaccgatactttcttccagataagtagaaatccctcgcagattagcaagtcctccagtaatataaatcccgtttttattaatatttctccggacatcgggaggcgtacggtcgagcatggaatgaatggcccgcacacattctctcaaaggttctttgatcgctgcccgtacaagactgattggaatgtcaatgtgcgacggaccgccgcgcatcatatctctgccgtatacagtaagaaagcttccggtggactggtcaaaaactccaaattcttttcgcagccgttcggcagtcggacggccaattataaaatctttagaatgacggacaagattggcgatcgcactatccagctgttcgccaccgatcttaagcagacggttcataacaataccaccgtaggaaagaacggaaagttctgttgttcctccacctaaattggcgataaaagctcctggttcttccagaacatcaatcccaagtccaagtccgtctgcaagaccgcgctctacaattcttactgattttgctttcgcttcagaatgaagcacaagatcatagaaagccttcttttctacttctgtgacatctgtaggaacagcaatcacatattctgccccacggataaacggacgctcttccttcaaaagatctccgagaagatattgcatgtcatcaaaacgggcaatgacaccattcttcatcggaaatatgatctgtatatttcccggagccttttcatacatctcataagcatcgtctccgacagaaaaaatatattttttatctttcatggcaattacattcttggcatgccatatgcggtcttttttcttatcaaaaatcttgatatcataagttccaagatctaacccatatacattcctggccataaatacactccattcccttatctatttgcagattcttgagaaaagaatcctttctcccttaaactgaaataacaattatctccaataatgatgtgatcgagaagttctataccgatcaaagcccctgcttcacggacgcgccgggttgtcagaagatcttctttgcttggtgtcggatctccactcggatgattatgcaaaagaataatggatacagcattcttctgcaaagcttccacaaacagttcccgtggagaaacaagtgtggaatttatggttcctgttgaaacatccatctcactgatcagcctggatctggtattcagaagcaaaagcttcattacttcccgtttcttatgccgaagatcctccatataataacgtgcaatactgtccggggaggaaaaatccaatcccagtgaggcttctgctttcgccatacgtcttgcaagttctgccagacaaagaatctggatggattttacctttccgattcctttgatcttcagcagttgttccatagaccactgtgggatgctgagaagtccttcagagccaaatggtggatgcagaatcttctgggcaagccgaagcgaattctcccctttcgttccggtacgaagtaaaacagctaaaagttccacatctgtcagatgttctgcaccgtactgctcacatttttcataaggacggtcttcaagatacatcattttgattgtttctgtatttctattttccatgtgaatcatatcactgcgatgacataatacaacgatttattttagcacagtttcaaaaaagtgtatagagaagataccaaaaaaccacaaatttcataaatgattaagatttatatttttgaatgattgcctcggcgaccttcattccgtccatcgctgcggaagtgattccaccggcatatccggccccttcaccacatggatagatccagtcacaggaagcacagacaaagttctcatccctttcaattcttacaggggaagaagttcggctctccacaccggataataatgcatcattatctgcaaatccatgaatcttatgatccattgctgtgattccatcctcaagcgactgtgcgatttcttctggaaagataccacgtacatccccaaagacagaagctcctttcatgcaagaatgaaccataccataagaagttgtgatctgatcttctttaaagtcgccaaaacgttggacaggaacttttccctgtcctgcctgataagctttttcttctaagctgcgctggaaagaaatcccggcaagcggatggtcagaaccgaagtcatccggagtaactgtgacaatcacagcactgtttgcattttctccggcacggtcatgatagctcattccattgactgcgagacgatgctcttcagaagaagcatttacaacatatccgcccggacacatacagaaagtatagactcctcttccattgtccaagttctcggtcagtttatatgctgctgccggaagatcatttccccgatctcttccatattgagaatgatcgatcaatgtttgtgggtgttcgatacggactccaacggcaaatgattttgcgcgcatcggaatctgatgcttataaagcatttcaaatgtatcacgggcgctgtgaccgatcgcaaaaacggctgctccggcagatacttcttctgcggaattctctgagaggtgaacaagtttcagtgtttttgatgtcagatcaacatctgtgacctgtgtatgaaaacaaaattcaccgccaagcgaaatgatctcctgacgcatctggcttacaacatcaatcaggacatccgtaccgatatgcggcttatgtgcatataaaatatcttcgtccgctccgaattttacgaaagtctcaagaacgaaacggttacgtcctgtcttatcttttacaagtgtatttaactttccatctgaaaatgtaccagcgccgccttcaccgaactggacattggaagaagggtcaagcacaccggtctcccagaaacgatccacatccttcttacgttcttctacacaggcaccacgttcaagaaccaaaggacggtatccttccagtgcgagcagataagcgcagaatagtccggcaggaccgctgccgataacaaccggacgggcattcagaatctctgttccgtgagatggaatctggtaatgcttctcttctactttctggatgtttcctttacaatgctttaaaacagcattctcattggaaacagtgacatcaaccgtatacacatagaacaactccggttttctgcgtgcgtctaatgactgacggtgaatccgataagtaaaagaatcccctttctttagatgaagtgtcttttgtattttcttttcaagagcttcttccgtgtgtggaatctgtagtttcagctgattaattcgtatcatttatctatcctttctttcaggaaatctaatattaaagtatatcatccagatattggttacaagttagcagcaggcgattatgcagatgcggcagactgtccggcaacataaccgcttgcccacgcccaggtgagattatacccaccgcagattgcatctacatcgaccagttctccggcaaaataaagcccgggaacaagtcgggattccattgtttctggattaatctgtgtcgtatcaacgccgccacagcagatctgtgcctgttcataagaatttgtcttaattacaggtgatttgaattccttgatcatccatgacagcctctgaatatctgcatctgtaaagtcgccgcatagcttctctttcttgattttggtaaatttcagccatacagcggccaatttttcatgaaacaggccggtaaagaactgttctgctgtcttttccggctggcgcttggcacgttctttcagaagaattttcacttcatcaaccgaatattctggaagaaaatccagcatggcaacaacttccttctgctcatataatgctttcgatgcatagcggctgatctggaataccggaattcctgagattccataggcagtcaattgaagttcaccggtatcagcagcagttaattcaccgtcaacaaacaacgaaacttttccctgtgcacgtactccggcaattgcgcggaaatgctttccggtacaatgtaaagcacaaagagcgggaagtacaggaattatctgatgtccaagctgtttggctaaagcgtatccggaaccgtcagaaccggtggaaggtgcggcttttgatccattgcagagaatcacctgatctacggtcaataaaccctgtgaggtctgtaggaaaaatcgctcttttgttttctgtattccggtgcaggaagtctctgtacgcacatcaattccaagacggtaaacttcttgttccaaaacatcacggatggcacttgcctgatcggaaaatggatacagatatccatttctgtcttttggatagattccaagttctcggaaaaaagcaatgactttttccaccggaaactgatccagtacccgcgtgataaagtcaggctgctccgaacgataacaggaagcgtcctgataagtattcgtataattacaccggccatttccagtcactaatattttcttacccaatctatcgttttgctccagaaggagaactttcgctccctttctggcagcgaaaatggcggccatcattcctgatgcaccgccacctataattgcaattgtgttcattaaaattcatatcctcttactttcttagcagattacatctgtctgaattttaacataacaattgattcaactcaactgaattttcgatagaattctctcgaaaaattgttttacagaagttctctcacacgctcgatagaaagaacgcctgcatcaataacgctctgcagtgatttgagaataccaagctttgcatgataccatgtgagtccaccctggaaatagacagcgtacggaggttttactggtccatctgcacttaattcaatggaagaaccctgaacgaaagcaccagctgccatgatcacatcgctgtcatatcccggcattgcccatggttccgggcttacataactgtctaccggagcagctgcctgaattcccttacagaatgcaataacaccttctgctgatccaagtgtaaccgcctggatgatatcatgacgggattcagaaccgttcggaattaccggatatcctaaagcttcgtagatatttgctgcaaaagtagcaccctttaaagcaccgcatacaacagttggtgcaaggaagaatccctgatagaaggactgtgtaacaccaagtgtagcaccgacttctttaccgagtcccggagaagtcagacgataagcacagttttcgatcagatcagctcttccggcaatatatccgccgattggggcaagtccgccacccggatttttgatcagagaaccgacgatcatgtctgcaccgacatcacttggctcgatacgctcaacgaattcaccgtaacagttatctaccatacagatgacatccgggcgacgctctttgataaatgcaatcagttcgccgattttttctacagagtagcttgggcgtgtctggtatcctttggaacgctggatcgttgccagtttgattgttttatcttccagagctttttcaatcgcaggataatcaaaatatccatcttccagaagttctacctgtttataggagattccatattctgcaagagagccgttagatgggcgtattccgattacttcttcaagtgtatcatatggttttccaaccggagataacagtgtgtctccaggacgaagattcgctgcaagtgcaagcgcaagcgcatgtgttccgcaagtgatctgcggacgtacgagtgcagcttctgtatgaaaaacagaggcatagacatcttctaaagtatctcttccctgatcattgtatccatatccgcttacatagttaaagcatccttcacttacgcggttttcctgcatggcatgaattacttttaactgattgtattcagcgtttctgtcaaattcttcaaaacgttcttttagtttctcttctgtcttctgtccgaatgcccagacttctttgctgattcctagctgttcgtaaattgtttctgtagttggtgtattcatttttcttcttctttctttttaagttttttatcgtttgatttacatggcaaagctgcattttatctaaatgcagcctgatgtcctaatgaatgatttctttttcctttaaaacagtgagcatctgttggatcagttgttcatcttctcttccaatctcacttttatcaagccagatgacatctcgttctcttctaaaccaggtcaactgccgcttggcaaaatgtcttgtgtctctcttaataatgcgtacggcttcttccaaaggatactctccttcaaaataaccaaacagttctttgtatccaagtccctgcatcgcaacactttctcttttaagtccgcgcaatcttaacgcattgacttcttcaagaagtccttcttccatcatcagatcaacacgtttatcaatccggtcatagagaatcttacgatcatctgtcagcacaaaatatgcggagttataagcagattctttctcacgttccgcctcattgtgctcggaaatcttctgtccggtctgctgataatattccagcgcgcggatcacacgttttacattatgaaaatgaatctgttccgcagattccgggtctactttttcaagcatttcatgaagatattctgcaccctgggttttggcaagtgcttctaattcttcccgataagcagtatcggcattattttctgtgaaatcaatgtcgtaaagtaatgcctgaatatagaatcctgttccgccgacaacgattggaatgtgtccccgctgatagattccttccattgcttcttttgccatctgctgaaagagaacaacgttaaaatcctcagacggatcaagaacatctaccagatgatgcggcacaccgtccatctcttccggacggatcttggcagagccgatgtccatctccttgtagacctgcatagagtcagcagaaatgatctctccgccgatcgctttggcaagtccgatggaggcagcagtcttcccgacagcagttggtccggtcagaatgacaagcgggcgtttgtttgtctgttccatctatatttcctcgattccttttatacaattcgtttaaatttcttttccagatcacgttttgtcatggcaatgattgtcggtcgtccatgcggacagtgatatggattgtccagtgtcaggagttcgccgatcagtttgtctacttcctgtgcagaaagacggttatttccctttacagcagctttacaggacaaggatgcaaccttctcatcgatcagctccggtgtcatagaagtagaaagaccttcggtcagatcatcgatcatctccatcagaagttctttcttggcaatactgaacaaattgtcaggtactgcacggactgcatattcttccccaccaaatggctcaatctcaaacccaatgcgtgaaaagcggtccatattttcattcagaagctgtgcttcctgcatggataagcttaaaatgatcggaggacttaagtactgagaagtaaattctctgcttttcatttcacgcaaggtacgctcatacaagacgcgttcatgagccgcatgctgatcaatgatgtagagattatctttgaattctacgagccagtaggtgtcaaagacctgaccaatcagtttatattctgcacggatatctctttttaagaaattttcttcaaagagatccatctgagtgcctgtttctggatctggttttgcattagttgcttcacaatccggtgttgtgtttgcacttgtggcaacagtctgtgtttcagcaactggttcgggtttctgaactgttgccgcagtttccggtgcaactgtcttatctgctgcttcaacggcgtatttgacatgttcagcaattttgtctttctgttcatctgcacggaaaatctctttccggtctgcaacttcggcggaagaagaacgattatggtaagaaagtacgcgctccttcatcttacggataaaataatcctcatcttgaatatcatccttaaccgtttccctggattctttgatcaattccgcagctgttactttttcattctccttacgcggacgaagaagaaacggactgccggtatcctctttatctttggtcgaagcggatgtgaatgtctttttcactcgctccggtctttctgccttgttttcgttcgattccaccggatcaggaacttctgctttctggatcagttccggttccagcaaagtcctgtgtacggcttcaaagacggtattataaacctcctgctgccgtgagaagcgaagctccatctttgtcggatgcacattgatatctacattttctccactcagatgaaaatgcagaactgcaaatggaaacttgtgctgcatcacaaaatcacgataagcgtcttccacggatttggagatcattgcacttttgacataacggccgtttacgaagaaattttcaaagttacgatttccacgtgtgatgatcggcttgccgagaaaacctgtgatatggataccatttttctcataatcgatctcaatcaggttagctgccacatcacggccatagacattgtagatcacatctttcagttttccgtttccggaagtacgaagtttttcctgtccgttattcaaaaactgaaaagcaacttccggatgagacagggcaaggtgcatcaagagatcctgcacatgtccggcttctgtcattggtgttttcaaaaattttcttctcgcaggaacattgtaaaataactgatgaacgagaaaggttgttccgttcggcgcaccgatatcttccaaggatacttcttttccaccttcaatgacataacgggtaccaaactctgcatcggctgtctttgtgatcagttccgtccgggtaacagctgcaatacttgaaagagcctctccacgaaatcccaaagacgcgatgtgagacaggtcttccactgtctcaatcttgcttgtagaatgccgcaggaaagcacgctgcacttcatcctgcggaatgccacagccattatctgtaatacggatgaaggaaatgcccccgtccttgatctctatttttacagaagtagatcctgcgtcgatcgcattttcaacgagttcttttacaattgacgctggacgctcaattacttcacctgcggcaattttatcaattgtgatctggtctaatacatgaatgtgtggcatatttccgcctttccttttaccaacggttcttcagcttattctgtaaccggtagattgtatttaaagcatcgatcggtgttagattaccgacatcgatatttttcaattcatcaagtacgtcatcatcttttacagtgtcaaacagagacatctgtgccatatcgacttcgtcatatttttttgccttactttttttctttgcagtatgttccttggccgcgatctcactgacgcggtttgtgatatcctcatcgctgagttcctctacgatttccttcgcacgggaaatgacaagatccggaacgccggcaagttttgcaacctggataccataactcttgtcagcaccaccttttacgatctttcttaagaatacgatgtcatcgcccttttcttttacagcaatacaatagttgttgacattatcaatctttccttcgagttctgtcagttcatgataatgtgtagcaaataaagtttttgctcccaacagtttgctgtcgctgatgtattctacaacagcccaggcaattgacagaccgtcaaatgtacttgttccgcgtccgatttcatcaagaatgagaagactttttgaggttgcatttcttaaaatattggcaacttcggtcatctcaaccatgaatgtactctgtccggaagcaaggtcatcggatgctccgactctggtgaaaatacggtcggaaagacagatgttcgcgctttctgccgggacaaaagatccgatctgagccatcagtgcgatcaatgcagtctgacgcatgtaagtagatttacctgccatgttcggacctgtgatgattgaaattctgtgcttcttatcatccaggtaagtatcattggcaataaacatatcatttggaatcattcgttcaacgaccgggtgacggccttctttgatatcaaggattcctttttcattgattttcggacggacatagttgttgcgctctgcaacaagtgcaagagaactgaaagcatccagtgcggcaactgctttggcagtttgctggattctctccacctgtccggcaatcgtttcacgaacttcgctgtaaagctcatattccagtgcatacagtttatcttccgcaccaaggatcatatcttcaagttctttaagctccggtgtgatataacgctcagcattcgcaagtgtctgttttcttgtataataatccggtacaagatccttgtaagaattcgtcacttccagataatagccgaagactttgttgtattttattttcaggtttttaatgcctgttttttctcgttcatcattctcaagttttgcaagccagtcttttccgtccgattttgcccggcgaagcttatcaacttcttcgttataaccgtcgcggataatatttccctctttcatggcaagcggcggatcctcacgaatggcttttgtgacgagctcgcagagatcttctaatgcatccagatcttcataaatctcttttaaaagcggtgcctgcagatcctgtaaaatatagcggatcggtggcagcatctccagagaacctttgaatgcggtgaggtctcgcggattcgcagaaccgtaagtgatcttcgtgatcagacgctccagatcgtagaccggagataaatattcccggatctcttcacgggcaatggcctgatttttcagttcttctactgcatccagtctgcggttgatctcggatttatcgatcaaaggctgttctacatttttgcgaagcgtacgtgcgcccattgcagtacgtgttttgtcaagaacccagagaagggaaccacgcttctgcttctcacgtaaagtttcgcacagctccagatttcgacgtgtagaactgtcaatcagcatatattttcctgtgatatatggtgtaatatgtgtcaggttggaaagtgaatttttctgtgtctcaaataaatagatcagaagtgctccggcactgatgattccacagtcataatcagcaagtccaagccctgcaaaattctttactttgaaatgctcaagcagcttatctttgcagacagcatcatcaaaataccaggaatcgagagaataaatcgtgattccaagcttgtctctcatcgcatccagatccataccgctcatatagaacgcttcgttgcagatgatctcagacggactgaatttataaatctcatccatcagacggctgctgtccggaagttctgtgacaaaataatctccggtagaaatatctgcgattgcaactccatagcggtctgcaatatagacgatacacatgatgtaattattcttcgtttcatctaatgcctgtgtatccagattcgttccgggtgtaacaattcttacaacctcacgttttacgatcccctttgcagtctttgggtcttctacctgttcacagattgcgactttgtatcccttcgcaacaagacggttcaagtaaccttctacggcatggtatgggattccgcacatcggggcacgttcatccagaccacagcttttcccggtcagtgtgatctcaagctctcgggatgcagtcaaggcatcgtcaaagaacatttcgtagaaatcgccgaggcgatagaataagatacaatccttgtactgctctttcgtctcgcaataaattttcatcatgggcgttaacttatctatgtcaatattttccatcaatttctccttagttttcaagggttttctaaaaactctttagaatgtaagttcgcaaatcattctaacaaattttaacatgaatttcaagctgatgttgaagatgttgagaacgtagaaatgtatcattttgtcggagtacctatatcgcaatgtgcgaagagagcgaactgaagaatattcgtttaatattcttgggttcgctctcttcttttaatttgaaaaaattattatttcatttttcataaacaacttctaactgtccggcatccatctcgcataccgtatcacacaaccattccatttccatcacattgtgtgcagctagtagaatagttgtccctttttctttcaattcaacaaagagttcgcagacatcctgtgcgcctcttttatccaatccattgaatggttcgtctaaaattaatagttttggccgctccatgatcgcctgtgcaattccaaggcgttctctcatcccgagtgaatattgacctactttctttttagaaaacggatcaagaccaactcttgcgattgcatcccggatctcagtatctcctatttttctattaagttgtgcaagtcgttttaagttttcatatccactgatatatggaagaaatcccggactctcaataatcatcccggtattttccggaaaatcaatatcttttccaattctttttccatagacatatacgctccctctgtcaggttgaagaaaaccgcagatgcatttgaacattactgttttaccggagccattaaatcccataattccgtggatttttcctgcctcaaaggtatgactgattccttttaatactttttctttgccaaaagattttgttagatttttaactttcacagcagctttcataattttcccctttcttattccgtcaggattcatcaacctgagaaaatgtaaaattatatcgtttgatacattttctcgagatgaaaagcaaaatacatatcactgcaaggaataacaggatgcttatttttatttgtggcaaataatcatatccgaaattatgcattggaaatgttgcgtgatttaagggtgataaccatccgcaaagaatatttgcccgataggaaagccctccacccagatgaaaaactttttgaaaaatatccggagtcagaagaattccataaagatttatcaggagtgcgccaacaacgcctccggctcttcccttctgtagatttaatacaagcatgacggaagtaataaataacgaatagaaaagcataagaaatacaacacagattgcacatttatatggtgttgtcatttccattgtctttattgatacaggaaccgtaagatgattattacttccatatccaatgcttgcagcggtctgactccatacatttccaacgtaagcccagggacttgcaattagaagttctgtcaggcagaggaagacggtataaaggcaagtagccaggatcacatataggatctgacttgccatccatacgcttcgctttgtccggatcagccaatagggtgtcatctgatttacaaaaggcatatctgcaaataataacagcagtaaaagggatgaaagcatcacggactgtgcgtcaccgaaggtccagatcagtggctcgaacatctgcaccggtgtctggaatgtctgtgcctgctctaaaatctgatttgtcaacatcagacaaagtacaaatcctaatgcaaatgtcatccagattctcggatttttgccccagtcagagaaattcctttttgttagaagaaagatttgatgaatgtccattttaaattgcgattttttcatgcaaccactctccttaccacgcatttacgcaaagccagtaccagaagactgctgatcagaagcagagccagaaggcagaatccgtttccataatattccgggcttgcccactgctttggactgaggaaaaaataattgcggtaatagcgttcttgaaacactgtgagtacataatataaaataaatggaacagcacagctgagatacttattcttagtcaaaactgctgtcagtgaaccgcataaagaccacaatgctccatttagaaaaagtctgataaatccaattcctgtgatacttattacctctgatatattttgcaaagtattcagagtcgggatatttctacagataactataaaaacaaccaatgcaattcctgccgctgaaacggaaatggcaccacctgtgaatgcaactccaaaacttttcatccaaatataatttctttttcctattctgttaataagaaaccatgcatagcggctgtgtaattcttcctgtatatctgcggctgttgccagaggaaccaacagtggaaagaaaagcaaggctttttctgaagtgattgcataggtgaaggtgcataaccatgcttccccttctgttgatccaccgaaagcgatcagatgatttcgataaggaagtgcaacaatcaaaagaaccgcacacaacgccagtacagagatataaaatcttcggtttccaaagtcatatttcaattctgttctgaaaagatgtcttcgtttcatattctatcatctccaataagaacctattcttccaccgtctgttgcattcaatacaatgtagtcggtctgatatccttctattttttttccggctgttccaagttcggcagttgtatcttcactctcgcttatagtgaaaaaccatgccggaaccagccaggcattttgtggattcttatatgccggtatataagtatatcctagttcgacagttgcaacatcataaccaaatatcgtcttgtcctcagcaggctgactggaagggtaaagatatttcacctgatcgatcaggcggttttctatttcatcaaatgcaaggagttttacattttctgtaactatcttttcttcctgactcatacccttccatttgaaggaacggattccatcttctgtcactacaatataaatctgctctaccggcatggaaggtgcatatgcaaatccactatcatctgaatatcctccggatttatcctgatttatttttaatccggaaacagaaggaacgtaagtaagacgataacctgtttttccaagatttggatcagcattccataatgcttcctgtggttctaatatagtggcttccggataatcagactgtgcataccagaggattttgtctgatgacaacaactgcatattttcgaggttcagatctttcagaactttttcagcttcatcttctgctgtctcttctaagagagaggtttcttccatctggtccttcagtgcttgtagtttttccataaaagattcttttacgtttcctgcaggaactccatattgggctgtgagattctctcttgcgagagtgttttcaatagttgccagttcgatcccatttccttctgaccaggagaagatactataatttcctgcttccggatcgtaagtttctgcattgatcgtaccctttgcatctgcaccaaccgttgcctgaaaatgaatctccattccatcctgctttgtggtatccggaagaatatcatttccgtaagcttccagtgattttctttttgcttcatacgccggatctgtcttttttgatgtgtattcaatctgtccaatttcctgcaatggtgtctgctctggcgcaagaggaagaacttcttccactaacttttcaagccctgttaaatcatactccacactgttgtcagcatagaatccttccctgttcttaatcctatctaagaggttctgatagtattctctggtaagttcctgcgtctgatacaaaatctctccgcctgcaaaataggaaataagtccgtttaattgttcaagctccagttttttctgactgacttcaatcaccggaagatttcctgtcgtaacagattctaatttctgatctgcgtgaaaaactccgcggtcattactccatgttactgttgtgtcccagtgttccggcagattcagtgtctgtgtctctccatctttcaaagggtctgcaattacatcctcgcttaatcctccggccttactgacaactgcactctggtcaggtgtcttctgacatcccgcaagtaacagaccacaagtaagactgactgtcagaatcgatggtaaaatgattttagttctctttttcttaattgtcatggcatcattcctccatttccattcctgtttgtgtgatacgaattttgtatcctgaaaatttggaacaggtttttttcttacattcagtttaatcttgtggtgaaagtactgcaagcggatggccttcaagtactggattactggacatgagtatttataaactatgagaaacacgctctgcgagtttctcaagttatcgcggcagtcgccaaggtctcgtgcaagcacggactttggctcgttgctcgcataaatcaaaaaatgttattgaaacaacaaacattccatcttccatttcataggccagatctccatcatatcgtgtgacaatccgttccacacttttcaagccatatccatgaagagatttatcctgcttcgaagtcagaaaagtatgtcctgatttggcaggaagcttatcggttccattcttaatttcaagaaacaacatctgcatatgctgctcaatctttatactgattttcttacgttctttatcagtcactttctcacaggcttccagggcattgtctaacagattcccaaatagtgaacagatctctctttcttccatcgtcagactggatagtggtgttacatccaattggaaatcaatccctttttgtactgccaggattcgcttttgcccaagaatcagatctactacatgatttcctgtataaatctgtggattgatttttacaaaatttcttctgatttcatctacataattttccagtttttcatattcctgatttttcacatattcactgatcacaagataatgattctttgtatcatgaacgagttctttgttctgctcgatggaagctcttatttcctcatacttttgcttctccatctcttctttcatcagaagaaatgtattttgtcccgttatgtttctgtttttccatataagaaatgtcatgacgatgacaagcacgatcatagtaagaaaactgatgagacttccttttaagacatcctgaatcaccggaattccggctgtggagtacagtagtccatactttaaaagtttctgatactccaaaacgagtgctgataacagtacaccacataaaacaaatacccattgaaaggcttctatgtcttttttcttcttccagcttcttattttgaaaatgataaaaaaggaaataattaataacaggctttgtatcacacaaaatacttcattttcatggtaacggaaaaataaaatctgagggttttcagcctgattcccgtaaataaatgcgagaaggtagtaaatgatatataaaaataacatcattgctgcttcatacatagatgcgatccctgtaagaagaatcagttgctttcgataggcaaggaaacttcccaaaaccaaaattaaaatcgtcaacaggtatccataagcactaaacacagatcttttgacccatacagaaataattgttgaagtgacgattaaaacaaaatagagaatccatttatctttcgttttcagagtctttctgtctataactgttccgaataacagataatagaaaaggaaggtttcaagaaaattcagtccaatacatattccaagtgtattcatcgttacgaattcctccagtagagattgatttctcgctttacttctgcaagtcttgccttacttaccggtacttcatatcctttttcgagatagatagtgtcaccgcttactctgcaaatctgctttatattaacagcgtatccacgttccaccagaagaaattgtctactatttaacattttcagtgcattttccaaagaagttcgctctctcacaacgccttgggtagtaacataatttacatacttagcacctttggatttatacagataaagaatatccttataaagcaatttcacctgttctgtaccgtcttttataatacagaattctttcttttgtttttgcagcttttcaataagctgttcagcaactccgggaagacgaaattctagatcctgtttcaaaatatactgatatgcttcgatccgataactttctgccgcatattcttcataagatgtgatgaagacaatgtacatgtcagggcaaatccttcggaccaatttccccagttccactccatccagctgttgcatctgaatgtctgtaaataaaatatccgctgcttcacctttctgaatttcctcaaagaaactttcacctgatgcatatagtttaatctctacttcgtgttgttcctgtatattttcctttagagtccggagaatttgttctcttgtctgttcttcatcgtcaacgattgcaatttttatcataagttgaattcacctcgcctcacataatcagtatcagtataacatacttcgaacacgcattcatattatggccataaaatatattggtttgggacataaaaaaacgaaagactcctgtaggagcctttcagactacggactttacaagtttccgttttcatctagaagatatatagcaaagacatttccaagttgcagaggataactttccttgatgatgccatcaaatacaatacgaatatggtcaccggcattcaaatcagggagctcaccactttctactctattcattgttacagagaattcttcatcaacaggaataccactatcaaaggattctgaacattttaccttaattgattttttctttacttcaagaacagttgcatcaaaatatacttgttctttttcctgtaatttctcagaggtatcttgtttactattgaaagtgacaaattcatcccacaatttatcgaaattaacaaactcataatacttttcatcaacaccgaaataatgtcccggacagagtgtaacgacgtcttttccttggaaataaagcttatagtaagtaactgctccacttaataatgcttgatttttatcaacttcatcaccaagctcaacttgattcagcaaatggacgaactccttcttttcctgatcagacaatgtataggaaaaatttccatctttcccacctgttgtgccagaaagttcgattttatcaatttcagacacatctatagttccaaactcaatagcagaatgggtgctattcttttgacagccggacaatagagttaccgtaatcagtatgaatgataggatcatttttgaaactgtttttttacattttgttttaaacatttttctgccctcctgctagtgtactgcctcattgttcgctattatatcaagtttggcaaagtatttttactatttttctttgaatcaattataacatgaacaagtttgcttttcacttgttatatgataaataaacgaaaaaatgcatgtgtatgatttttagtttcatactcatacattttttcttacttattaccagatggggcatctggaggagtgctcccctgaggtttctccatgtctgcgtcaggctgtctgttccctggtccgcctttcatgtcacctctttctccaccattgccaggcatttctccctgagcgttacttccataaaccagactatccatggtaacgctctgctctgctgttccggctgttatagtataagtctctccctgttagatttccggggtgcttatgataatggaagaatattgctttgctgctgtccaactaagaagttcagtactactactgtcaaggagtgaaatctcagtattaccctcctgttcatcaatatttaccataatagtgccctgcgttgaagaagaatcaaaattttgtgccatacccgaggaaccggatgctgcaaatatgccgccggtgatctgggcacttccattgtaatctaagcttccatttccatcatttgtaggacctgaaacataagtttctccacatcacaaaatgattaaaaaaagaagaaggtgttgccgtatcagcggacaacaccttaatgcttacataaaaatcattaaaatttaattttcaaatttccccatcataatatctttagataatccgattctgtttgttttaaaatggaagaaaggacgttccggaagtgcaataatatcaatcggatgcatatattcttccagacaatcgtatactttttcacgaatatcatccaccgtgtatcccttatcaagaacaacaaaaagatatggcacaaagcaacgatgatgttccggatcaggaatgattacaaaaaattcatcgtcaattcccgggatttctgcgtctgcaagaaggttttccatcggaagtgttgcaagagaaccaccgccatagcgaggtgcgtctcctctggttaatgcataaattgttccgtcttcctgcatatatccaatatctccggtatgcagccatcttgttccgtcagaatgtatcatgatagcttttgcggttgcttctgggtcatcgtatccaagcatggttccaggtccacattgacagatttctcccattgtgttatatgtaagctcttcttctgtgcctggcttaaaaatcgaaattgtagttaacggcattggaattccgacatttccatttctaattggatgaggtgttaacgggagtgacatatttgaaccggcttcactacatccatatccggttgtaaatgttgctttacaattatggtcgttcaagaatttttgtgcacgctgcagctgattgttgttatatgcttcacatccggctccggcggaaaacaggtgagacatatcataatcatccggaactctgccatttttcataactgtttcaataaacataggaatcagtggccagcagttcggacgatagcgcatcatttcaagatcgacatcttccggtgctacaaacgggctcaaaatcagcaatttatctgaagctaaaggcagaagcaacatagcaacaacgactgccacaagagacggtgtgagctgtgtcacgagccaggttggacgaaaatcactggatgcaccataaaagttcatctgatgcatatttccgatcattgtgtgggcagaatggattacctgttttgatggaccggtagatccacttgtataagcacggaaaagtggacggtcaatgtttttttctgcctctacagtaccttgataagcttctcctaatttgagaaattcatcccaggatattgtacacggaccatatgcaggataatctgtataaagtgattcaagataattccagcaataatccgggacttctgatcgattggcactttgtataggacttaagagaacagctccgcgtacacctgcttcattacgatatttgttcaggtcttcatgagataagaaatcctgtgcgataatcatttttgcaccggatttttttactgcatcaacattttcctgaatcgtattatctctgcaaagaagggaagctccgattttttctgctgcaagaagtacgtagatgaattcaggtacagcgcgtaaaaacattgggatttcgtcaccttcaccaaaaccgattgctcgaagggaacgtgctactttatccacctgctcttttacttctttccaggttatttctctgccatagtaatgaattgctgcgacatcatctcccgggcaacgtttcagtaaatattcataaaccgtatcttctggaatagaaagtccttccatcaactgtggtggataatactgcatccatgggcgatcaatactcggttttcctgtcagtgttctagtcatatttttatctccttcctgttttcagaatactcatggatctagaattcatcttcgaaaataaatctcatgaaatattttaaaaatatgtcttagtttaacactgaatttcttgaacgggtttgattcaagatgcagaaaaaacaggtatctgattcataaaatcaaaaagaaagttcacttacgacaatcttgatttctagttaccagctatcgttcccatatagtaaaatcctttacattcgtcaaggtgaacgtcaaccagctgaccgatcagactttcatcccctgggaaatgaacgagcagattattgctcatgcgacctgtcatcagatgcttatcatgttcgttgacacactctacgagaactgtctgcacggttccttcatgaattgcacactgttctgctgaaatggtctgaacctcatgtaaaagacgattgaaacgatcttttacaacgtcttccggaatctgatcttccattactgcagcaggtgttccggtacgttttgaataaataaaagtaaacgcactgtcatagcgcacttttcttacaacatcaagagtttcctggaagtcctcttctgtctcaccagggaaaccgacaataatatctgtagtaagtgatatatccggaactgctttgcggatcttttcagcaagtgcaagatactgttctttgtcataatgacggttcatgagtttcaggatccgactgcttccggactgaaccggaagatgcagatgtttacagattttttttgatttactcatcacttcaatcaattcatctgacagatccttcggatgtgaagtcatgaaacggattctttcaagtccttcaattttttcaatctcctgaagaagctgtgcaaatgtcatcggttcttcaaggttctttccataagaattgacattctgtccaagcagcatgacttctacaacaccatctgcaacaaggcgttcaatctcgcggatgattgcctttggatcacggcttctttcacgtccgcgtacgtaaggtacgatacagtaactacagaagttgttgcatccgaacatgatatttacaccagacttgaaaggatattttctttcaaccggaagatcttctacaatcttgtctgtatctttccagatatcaatgacggttctgtcagactgcattgcagatgttaaaagctcagcaaatttataaatattatgtgtgccgaaaataagatcgacaaagcggtagctcttttttaacttttcgataacttccggttcctgcatcatacagccacacagtgcgatcatcttatgaggatactttttcttcattgcgccaagctgtccgagacgaccataaacacgaagatttgcattctcacgaacagtgcaggtgttgtagatgacaaagtctgctgtttcttcatctgttccttctacataaccgactttttccaaaattccaagcagtttttcagagtcgcgggcgttcatctgacaaccaaatgtttgaattaccgcgactaatggacgccccagtttctcagacatttcagcaacatattcttttgctttttccataaaataatactggcgtgcaggctcttccaacggagcattctccaccagctttacattttcaattatttctttcattctcatttcctttatacaaattgattgcaggatgcatcataagcatagtcaatcagatctagtttatctataagttcttttttatttacttccatctcactgcataattgatctagtgacggataaaaatctctaagctttgtattcacaacactcaaaaggataacaggatcctgtggtaaattctgtagcatgatcctagtttcctttcttgttcatatatttttcgccatacttctcaccaagattaacaatacttccatctttttgttccatgtcaatattgttcagctggcttcttaagttcactcggataagttccatatattctttacgaagaatcttctgttctttcgcttcttccggagtgagtccttccgcttttgattttttatataattcattgatacgatcaatcttcttttgttccattgtctatctctctcctttttcttgttccgtttaatgttgcgatattctttactgttcactcccgtgtgaacagtaaccgatattctttccgctgactctgtattatacacgattctgtgcacttcgtccactttttaactggaataattctcaagaaaaccatacagttcttcggcagacttaagatagattccatttttcagattctgttgtacttcatccggcagattatttacggataggctggttgtttcgtaaagggttgtcccatcttgcagatagaccgcaacatatccatgcagctctttcagataataggcatcatctgaaacagactctcctttggctgaactgcgtctggtttgaatggaatcatttttttcatttttagccagttctatagctttttcctttttcagtagattgttgtaactaacctgataacctgcaatcaaacatccggtaatcagaaataaaacagaaaaaaagccaatcatgtattttttcatcgcaaatcgctccttttttcatacagtattggcttttttattttttttattcttctacttttacggctggaagcagatggaatttcttagaaattctcaggatccgtccacccattggaagatcaaggatatcatcttcagaaagtgttccgatcttcaacataacaaccgcataaacaagtattgctacaaacagtgaaatgcatactggaattacacgaccgccgatcagtgtatcaaacagtctgaatacgccgaaagttacaatgcccatcactgctgctgcagcgaatggttttccaaaagtgcttacaaaatcgattttgaagccgctgacttttcgaatcttgagcaggttcaaaatactcattgcaagtgcaaatacaatatttccacccaccagtgcatagacgttcatcttgaatacagtcatcatcagtacaaatgctaccagatgaattccaagagctgctgcagcattctttgcgggacttgtcatgtagtttaatccatgaagaatggaattcgttacagaggaaagtccatacagtacaacaacgatagctcctgccatcaacagacgcgccggtgttgcactggagtcattgtacagcagaaccataattggggaagcaagtacaaaataaccgatacaacttggaatagcaattaccattgtaagacgtaaagtctggttaatcttattgtgaacctgtttctttgtacctgctgtaacaacagctgtaagacttggcacaagagatgttccaagtgcgttcgcaattgccatcgggacattgatcagggtgtcgtatttaccagtgtaaataccctgaagagccatatattctttctctacatagccttgtgactccataacatgattaaagattgtaaggtcgataatctggttaatattatatacagcggtactgaatacaacggggattgctgttaaaagtaatgctttcagaaggaaagaataactttcaacattctgggtgcggtctcttttaagctgtttgcgtattatgtttttatataaaaaaatgacaaacaaaagaaataacaatccagataaagagccgataaccgttccaagtgtacttccggcagcaccgtaagcaggtccgagaagctcttctccggatttttctcctgcttttgttccgatgccaaagaggacacttgcgccgacaatactgatcacggcattaaatacctgctcaatgatctgtgagatagctgttggaagcattgttcccattccctggaaatatccacggataacagccatgactgcaacgatcagaagtcccggggcaagaacccgcagtgcgtaaacgctaagtggagatttcattaaatgtgttgaaatcagtcctgctcccaaaaagattgtcagcgagatgaataatccaacaccgattgcaaaagcaagtgaacagataaatacacggaatgcatttcgtctctgacgctttgcaagtcggatcgataccagcttggatacggcagtcggaaggctgaatgatgaaatcatcagagcgattgcatagacctgataggcatatccataaaatccgtttccttcatctcctaaaatattcgtcagcggaatcctgtagactacgcctatgatttttgtaagtacagctgctgctgcaagtatcgaaccctggacaatataatcatcctttttcgttcgttttttcgttgtttgtgcctcagtttcagacataacttcctcctagtgtcccattccttaaaatctatttaatatatgtatcctatcagcggaaaataccgactttttccatgatttctttctgtttcgcttccatgacaacacgttcttcatcaaccatgtgatcgtatccaaataagtgaagcatactgtgtgcaatcaggaaagcatactctcttttgggtaaatgtccatattcttcagcctgggataacactttttcctttgagataacgatatcaccaagcatcaattctccggattccggattaaaggcttctgcactttcttcatcaatcacggaaaaatctcccggttcttcgtattcgatcatagggaaagaaagtacatctgttgggcggtcaattccacgttgttccagattcatttcgtgaatctgggcattctctgttaaaagaagattgatctctgcttcataaggacagtctgcaagttctaatgcagcgtcaataactaatgcggcaatctcttctgtatcaaagtctaactttatattcccctcttcttcgataaaaagactcatccttttttcctcctgttttctctcggtctggacgatttcttctcatagtcctcatatgcttttacaattttctgaactaatggatgtcttacaacatctttgcttgtcagcgtacagatgttgatcccttccagatcttttacaacctttacagcaacatcaagtccggatattgttccggatggaagatctttctgcgtagaatcacctgtaatgacaactttggatccaaaaccaattcttgttaagaacatcttcatctgggccggcgttgtattctgtgcttcatcaaggataatgaacgcattatctaaagtacgcccgcgcatatatgccagaggagcaacctcaatcaatcctttttcagaattcttaagaaaactgtcagctcccatgatctgataaagcgcgtcatataaaggtcttaaatacggatcaatcttgctttgcaggtctcccggaagaaatccaagcttctctccggcttcaattgccgggcgcgtcaggatgattctgcttacttcttcgcgtttgaatgctgtgattgccattgccatcgcaagataggtctttcctgttccggcaggtccgagaccgaaagtgatcattccatttcgaattgcatcaacatattttttctgacctaatgtttttggctttataggttttccctgaagtgtatgacagatcagatctttatcaatagaaacaagggcttcttcctgatcttcaaatacgagcgagattgcatagtctacattctgttccgtaatcgtattccctcgtttagcaagttctacaagctgtgtaagtacacgctgggctttctgtgcagcaattgtatctcctacaatcttggttgcaccgtcacgtgaaatcaatgtgacatgaaaagttctttctattttctttatataagtatcaaactggccaaatacatttatctcgtattcagccggaatatcaatgatcagttccgacagactcatccggttcgttcctttctaaagttattctttcggtctctgtttcctcttcaatctgctgattcagatagagcgtacctgaagccgttgccttttcggcagatatatatatcttaacatttttttcattaatttgaatacccttttcctctaaatctttacaaaaatagcgaaatcgactgcttaaaattgtctgcatctcttttttcgtatattttattttcttgaagccgtatttttttattgtttcatgcccataaaaaacaggaagtgaaaaattttctcctagttttaactgatgtgctatacacaatttttcagaagtagcggacatttttggcttccatgtttctaaccggacagagccgatttgaataaatccggacttttttgtttcttttgtatatacttttttattatgataacaggaaattatatccagataagaaatctgtgtatcagcgaaaatatctgcatcggcatgcgtatattgatatccggtaatttcaccactgtcatccaggatgtcaatccgtccagatacaagtaaagttcctttcgttacagaatccccgatatgtacctggggaatgccggtgcgtgtaattaaatttgtaatgattccatcagtagaagcaacaagatcagcaggtaaagaatctgtcttgttactcttatctgtctgagtagatgagatgataggaagcgcatcttcattttcttttatctgtatttttaaccggctgccatcaagagaagcagatacccaaacgatatcattatattcctttcgaagggctttgacaatcccctgacaatctacatttttcttttgcattccaggataaatcccctcttctttcagaaacgttgtcaaggtcgtgtcggtccatcttttatttccctgaaaatgaatatcccatagaaattgcgagtaacaatcgattagaaaaatgcataggaagatgctgataaagaatagttttctttttcggtagcgataaagaaaaaaaggaaagccataccgtttttttagtatgacttttgtatgtgtttttctgacataaggacgaatctttcgaaaatcagataaactcaagtataattcataatttgttccgatacgggtcaatccccagaatcggatgcggtgataacagcagagattcagaaatcgttctggggagtatcctttgatctgaatcttcacataaccggacaagtagcggatcaggcaatgaatcaccccggattcctcccctcggtaaattctaaagatgataatgctccagttactttcatctcatcatttgtgtagtattgaatccggagtcgttttccctggatccggatctgtcctgcccgcgtctgcacacggatcagtgtatctgtgtattcaatgatgccccgataattttcaatgcataattcatttcgtcctaaaatggttataacagaagcattctgaatcacatcttttgggagatccattgcggataccatcttttctttgatctgctctcggttcattgaagttttttatataaaaatcctttgtcatcagtatatgaatatatcacgatgtcctataccagttgttttctgtgacagacctctatttatgataaggttcaccgttgatgatccgataacttctgtatatctgctctaacagaatgacccgcatcaactggtgtggaaaggtcatcttggaaaagcttaatgcatagtccgatcttgcgagcacttctttgcccaaaccaatggatccgccaatgataaatgtgatatggcttgtcccctgaattccaagttgattgatttttgcagaaagttcctcggaactaagaagttttccgttaatctcaagagtgatcacataggcatcttcttttacatatttcataatgcgctcagcttctttatcgcgaattgtattttccacgacatcacttgcatggtcaggtgtcttttcatcagctacttctataatctccagtttgcagtatcggctcaatcgcttgctgtattctgcaattgcatctcgcagatatttttcttttatctttcctacggttattaatgtaatcttcatttttctgttctttctgaataaattttaatcatgcatgcttgttaactgttattttgataagctgtcagcaatttcgtaaacatagagttcgtgaagagctcttgttgcgcaaatatattccgcctgatttttaagcggattttcttttgcaccgcgaagtgcgaaaacctggtcaaattccagcccttttgcaagataaaatgtcgttactgtgagtcctttcttaaatgcggaactgttacgatctacataggatacgttgataccacgaagtttcaggagacggcttaagtcaaaagcttcctcttctgttgttgtgatcagggcagcagtttcaaagtctcccggacattttaaatgacagacaagttcatcaagcaattccgtatctgtgttaaatgtcttttctacgacttcttttccatggcggtccagtaactcaagatcagatactccactgactttttccgcataccgggcaatttccaatgtgttccggtaactctttttgatttcaatcgttcggatctcacgtccaagtaatttgggaagaaatctcaatacatcctgttgctttgtatccagtgtctgtgcacggtctccaagaatagtcatcctacaatgaaacaaggattccagaatggtatattgcagatacgaatagtcctgcatttcatcaatgacaagatgtttaatgttcttatgagttgagttcccaccggaaagacgatatttcagatagagcataggaaatacatcttcataagggagctttcgtttttcgtacggaacttccggcaacagatcacaaccacaatcatcgagcatccaattataaatggtgtaaatatctttcgttgtgtacatcttgtcgaacttcatctgaagcatctcctgatcatcctctgaaatatttctgcctttcagagtttcccaggaatcgataaaatagtcttttacagcgtccatacgtttcaataacggagtctctgtgaatttataatagaacaattggatcaagtcttcttctgtcaatgtcattccacggaactcaatttctttgaattccatcagacgatcttccagaatcgcaaggaaaccttctatttcaccaataaaatctttggattgtttccagtcaaaacgattctgagctgattcatccggaaacttcatccgacgttccagctgatcataacgatcctcacagtctgctgcgacaccttttcgaagctctttgtaggcgtagagatcaaaactcatctcacggatattctcttctcctaattctggaagaatatgtgagatataatctgcaaatacgctgttcggtgaaagaatcagtatgttggatgatttcagagtgtcgcgttcatgatataaaagatatgcaattcggtgtaaagcaatcgaagtttttccacttccggcagctccctggattacaaggattcgatcttttgtatttcggataattgcattctgttctttctggattgtgcggacaatattttttaatttcacatcactgtttgttccaagttcttttttcagaatatcatcatcgatctttgtatcactctcaaaggcatagacaagttctccattctgaatcttaaactgccattttgaaagaatctctccatccagtcttccggcaggagcctcatagcttgcagagcctttatcataatcataaaacaaactgctgaccggagctctccagtcgtagatcagcggctgcataccgttcttttcagcaaaatttccgattccaatataaaacggttctggttcgtcatctccatcatacataaaatcgacacgtccgaaaaaaggtgcatctaacattttctcaaatctatgttttaattgcagcttctcattattagcgttgacctgatgcaggagtgcctgctgattatcgtaatcttcgtaaccatactcatccatctccgtataattttcccagtaatattcctgcatgttatcaatctctttctgtccatcagagagagactgccctatttcttccagtcgtttttgtaactttatctcaacatcttcaaggaagcatcttccatcaaatcgattgtcattgctgttataattcgtcatatgttttatgtttcctccaaaatagatttttgcttcttaggtttattgaaatgtatgacaaatttccataaggttctcttttcaatagaactctatggaaatttgcaaacatttgatttattattttaccatatcttcgaataggttgtcatctaatttgagcaaaattgctgtacgtcacaaaaacttttccgttgtctccctcaaattataacacgacaaattcaagtttgccgaaatatatttctaactttccctattttacaggctttccagcctgtgcattagcgaaacgatatgtattttcccttatttttgcccttatgagataatcgtaagggaaataagggaaagttttatttagtcattgcctgccactttatcaagtaaccttgcagattcccgcttggcttttcttgtagagtgtgcatagacattcatggtggtactgacatctgagtgccctaacagttcctgcacatcctttggtgctgctccatttgccagaaggttgcttgtgtaggtgtgtcgcaactggtgaaaatgaaatccttcaaatccatccagtttctgagcaatcttcctgcaaacaattcctaacgtgcttggcagttccaaacttccatccggtcttaagcagacaaaggatatttccttataatcttctggaacattctctgttccgtccagatgatagaactcatagtaaactctgtttttgtcttttacttctctgtagtagtttttatggtaaagttctccgtactgcattcggtttttaagttgttcctttcgggcattgcgaagaatctctgccagtgtatctccaaaatcaacaatccttaccttttttcgtttggttggtccgatgatattcttgtgccttgaaccatcatatcggatactgcgtctgattgtaaggcactgttcttcaagattcacatcctgccatgccagaccacaggcttcaccgatacgaagtcctgcataataagctatctggattggaagtattgccggtggattgtaattctgtagaaattcaatcagtctttcataatcctctcgtggaattggctgtatatcgccatccatgtcatcatcggaaaacaggtcaacctcatccgtctggtatttcagcttaatatactgcatcggattgaaagtgatatattgctttggtgatactgcaaatcggaatgactgctgtaatactgccgagaaagaacgaatgtaatctttgctgtaaccttttctttctgaaccatctggataagtgccaccaaaggaaagcagatcgaagaaggcttgtaaatgctcagatgttacatttttcaactttctctctgaaattggatgcttcttgatgttggtaatggcaccgaggtaattctggactgtcccattactgagcgtaccggtctttaattcttcctctgcccatatatcaagtaattctccaattgtaatattttccgactttgcaatgaatttcttgctttcgtaatcgtccattgcctgacggagcagtttttccgtttcacttttactttctgttccagcgtattctttctgaaccagattgccgcttgcatcttctacatagaagcggtagtaccatttctttcctttttttcttacagatccttttgccataatcgtgtgtctcctttcgatatcagacaatcggaactgatgaaatgcttcttgcgtgtaagtatatcataactccggttgtcgttctataccgaatcggaatcctcatacaaaacttctgataaaagattttcaagcctttgttctgccatttccggtttcttggaataaagccttacgatatctgccatgtcgttaaaggcattaacagtgtgggtgatctcccggagaaacataatctcgttatattcatcattcgattcaaaccccattacttttgcaatatcagcttcattcgtgttgcccttgtaattcttgcaggcaaactggaatgattccagaaacaggttatattgctttaacatcaacagcagtaaatctttggaaaaagcatcttcctttttactaagggcgagaggtaactgtttgagaatatcgcccattgcatcacgaatctgtaattctttcttatccgtaatatcggtttcgtattcatcggtttcccccttgagccattcaatagatacatgaagtgcttccgaaagaccttccagcaccatctttttggtattgtcaatcgaaccattctcataacgcaggattgtggaagcggtaactcccatcttctctgcaacataaggctgtgtcagatttaattccagacgacgctgttttgccctgctacctatcagcttgcgtagttctttatctttcatgctgattgcctcctttttcggtatgtatgaattatagcatgtacctcacataattgcaatatgcaatctaataattgtttttaaaatttcataacgcttgacaacgcaatataaaaccgctatactaacagcacaacaaaaattgcataatgcaatttataaggaggtgacaagatgacggaaagaaagattgcattatccatcgaggaagcagccgactatacaggaattggcagaaacactttgagaaagctggttgaatggaagaagcttccggtattaaaggtcggaagaaaagtccttattaaaactgacattctggaaaagttcatggaagccaacgaggggcgtgatctgagggataaaggaaatgtaaaagctgtcacaagaaatgtggcaacttaaaaaggcggcttcctaagaaaccgccaaaggttctatcagaccgaagccatgatatacctacacgcaagaggattataccatgtgcttctcctgatatgcaaccgggaactgttgtttatcggaaaaagaaaggatgaagacgatatggcgaaatcaacaaagacttatgaagaaagaatacgtgcattagagaaaaaggaacaggaaagcattgaagctacaaaaaagctcattgcacagcggaaggaactggaaaagcgaaagaaagcagaggaaagtaaaaaacgaacccacaggctctgtcagattggtggcgcagtggaatcggttcttggctgtccgattgaggaggaagatttaccaaagttgataggcttcttaaaaaggcaggaaacaaacggaaagtttttctcaaaggcgatgcagaaagagccacttacagatatggaggaagtgtaatggcggagggagtggtttttccattcccttcattgcctttgaatgaagggcgcacttatggacaaccagaggtcgtccttataagtttgccacaagtggcaaccggtctgcgcttacgcttgccgggctcgttccgtcggcggggctttcagccagacctgctcatgccgcagggggcactcttgcgcagagggcgttccgacagcttcactcctgccaaactagaagaagatgctgtcggaaatcaatgccggatacggcagaaagggggaatcgtatcatggcgatatttcactttacagtaaagattgtcggacgcagtaaaggaaaatctgtcatatccgcatcggcatatcttaatggagatgtgatgaaaaatgaggaaacaggcaggatcagctactacacttccaaaaaggaagtcgtctacaccagtctgatgatgtgtgaaaatgcacctcctgaatggctgcatgtaccggaagaaaatataaaaaggtttcaacagtctatccgttataaaagggcaggcgataaggaagccgcactggaaaagtttaaaatcacatttcagaaacagcggctatggaatgaggtattgaagatagaaaaaaatgcagatgcacagcttggacgctcgtttgaattttccttaccgaaagaatggagcagacaggaacagattgattatacaaccgaatatattcaaaaaactttcgtggacaagggaatgtgtgccgattggagcatacacgataagaacgatggaaacccacatgtccatttacttgtaaccatgcgaccattcaatccggatcattcatggggcaacaaagaagtcaaggactgggattttgtcagagatactgaggaaaatatcgtggttgatgaatcccacccggattggtggcaggataagaaaaatccagaccgtcatggaatccgtattccggtacttgatgaaaatggagtacagaaagtcggggcaagaaacagaaaacaatggaaacgggttctgaccgatgctaccggctggaacagtccaaaaaattgtgagttatggcgaagcgaatgggctaggatgtgtaaccggcatttatccatagacaatcagattgaccaccgctcttatgaaagacagggcaaattgaaagtccctacgattcatgagggtgcagatgcaaggaagattgaggaaaaatatctcaccggacagataaggaaaggttcatggaaggttgaggaaaaccagatgattaaaaaacaaaatgcactgctgcaaaaggtaattgcaacctttggtaaggtatccggtgcattgtctatgtggagggagtgtttgaatgacattagaagaaagcaaagaagtaattcccatgatggaagcaatgattacacagatagaggaacagcagaatatcatggcagagatgcttcaggagatacaggaaaaggacgagaagctgatgtgttttcaggagcaggaagaacgattgcagcaattagagagcgaattattagagctgcttcaaatcttgccggatacagaagaactattgatgcttttggaagaaaagacagaccagatacagaaactcacagacgaaaatcagcaatggcagaaattggcacagaaattaaacagcgagaaccggctattgcagaaacagaacagcgaattactgaacttgaacagcaattagagaaaggaaggttgattgatgaacgaattaagaaactcaaagagcgacgatcaactggaagagttgcttctgctgacagagcagatgcaggaagaactcgaccagaaagaccggactattcgggaactgaaaatgcagctcgacgaatcgctgaccttgaacgagaggttaaacagcgagaacagagcagggaacattcaagccttaaagaacgacttgaggaaaacaaaagaattgttgcagagcgagaaagagaaaacgcacgctgccgaaatcatgacagaggaatgtcaagataagctaaggcaggcagaacaggaacgggactatgcactctctcatcagaaaaaagtagagataccggttgaaaagccggtactctatcaaaagtgtcagaattgtaatcagacagcttatctgaaagccaaagaaaagtatgatacgcagagggaaaaactggcaggcagatataaaacaaaaacagtcatgtatgaagcattgatgtttctgctgatatggtattccgcatcaactactctttttcagatgatacagtcaaaggtatttatttctgattgcagaatattctttgatgcaatcggaactttcacacagactattgctggctggattgcactgataggaaagaatgtggcacagattagtaatggaatatccaatccagtcattgccggaattatatactggctgataagaatattgatttgcggtggatgtctggtgggtgcgggaatacttgtagcgtttatagggataaagattgcagggctatataagaaatactgttgggatatgattaccatactggtaacacttataagcctggaaatagcaatctactttggagattggataaagacagtcttgccgatcaatatgctatttctcttattattggtgcaactggtatatgttggaattaggtggtatgtaaaaggatggcaagaagccagaggatattattaaaaaactattagaaactattcatatttactttcgtgctaggacagattattctaaaaattcagtgatgagcatgcacatgaaatcttacttcgtttaggtacgaaaaagggcaatggaaactttgtgttcagatgagctctcactatcttggtaacaaccgcaagcagcagtggaatattgacggtgcattccgtatatattccacaacacatggctaagcccgactagaatgtgggtgaaaaatttcacgagtgccagagtttcctctggcactcattttattttcgctgtgcgttttttctgtactccaatggcaacaatccagtgcttttacggaataattctgcaaatcggcttgaagtggaatagcctactgtttgggcaacttgcccgactgtcagctctgtatatgccagcagatattctgcttgactcatgcgccgctgttgaacatattccgtgatggtgcagtcgtagtatttcttaaaacagcttttgagctttgttgttcccatgcaggcaatctgtgttagccgttccagaggaatatcaaaagcatagtgatcgctaagataagcggcaactatttggagattttcaatatcctgttgagagagcttatgggctggtttatcaggatgtttcttctgatattccaccaccattgaaacagcttctgcgactttaccctcataaaaaagttttgctgcaatcccttccccgcgatagtctttgatttcagtgagtaaccgtgacatttctggaaagtcggatgtttggtcgatcttccgaaatgcatccacaggattgatctgtgcctccgggtacagttttttcaggtagtcctcataatatgccggtgcaatctcaatcccaaccgaacggattggaatatttttatgtatcaaagccttgtatggagtgtagcctccaataaatgttttgatacaaccggcagacagtctacggtatggagataattcctccccggaaatagagtcataccgagtgatactcagacattccggcatggagcattccaacatgaaatcttcgtggaaggaaaagttatggattttaatatcatataagtctttctgtccataagtccagtaggtgccttctccaacttcgggagaaagtttccagcagtcacctaatgccccatattgctggttgtctgggtcacggataaaaccgtgttcaattagtagcggtgtataaaactggtcaataatttcagacatgaaaacagaccgcctcctttttgcaacgattagacgaacttttgaaaggaacagacgaacattgccggaacctattgaatgttgttcgataaatgcgtattgtattagacgaagattagaggtatctaaccgaagaatatcacaaaccacttgtcgagtcaagacaatgaaaggtaggaggtcaaaatgagtaatcaagtaaattctatgaacaaaggtctgacagtgaaagaccttgtaacaacaggtatttttactgcactgttatttgtttttgtattggtgggcggtgtcttttttgcaacgaatcctgtacttacttttttcatgccagcaggaggtgggctgcttgctggccccatttatcttttgctgattgcaaaagtacataagcgttggagcctttctataatgggcgttatcatgggtattatttggttcgtgactggtatgcactgggcttttgcattgggctacatgatcatggcgattgtcgcggactttgttgctggtgcagggcagtacaaaagcaaaaaactcaacagcctgtcttatatcctgttctctctcggtggcactggttcatatatcgtgttctttgttgatcccaacggctgggcgcagaccatgctggggaacggaactgaacagagttacatcgacaccatgcaggcaactgcaaataccggcatcctgattgccatgtttgttgctgttatcattacatctgcaatcagcgcttttgtaggctgcaaaatgctgaaaaagcagtttgaaaaagcaggtattacagcatgagcggtaaacgccataagaaagagctttggctcgacccacgggccaagctctttcttattcttatgtgtgttttatcgtccatgtttgcgccctcacttgcatatcaatttatccttgttatgctgattgcgatattgggggctttctttggaaagtggaaatatgtcattaaggctgtatgcttttatgcggtcatctgtgccctgacagtttggatcatggcagaaatgacaggcacgctgcggacaatgtttattgcctttttaggcttgtttcataaggtctatgcgtgcggaaccttggctgggattgttctgactactacaaaagtcaatgagttcctgtctgctatgaaccgtgtccgcgcacccaaaaagttagtaattcctatggcagttatgctgcggtacattccaactattcaagaggactggcgctatatcacagacgctatgcgaatgagagatgtttcaccatctctggcgggctttttaacacatccgggcatgacggttgagtgtatttatgtgcctttattgatggcagcttcaaaagcggcggatgatctttctgttgcttctgtcactcgtggaattgaaaatcccaatccacgcacctgtcttgtccagataaaatgcggaatttccgattggggcgtcatggccgttgccgtagcttatctgatttttgaattatgtgtgcgaggaggtgtgatcggttgattgagtttgaaaatgtatcgttttcctatacggggcaggaacatggtgggctgcgcgacatcaatttgaaaatttcggacggagaattcgtcctgttctgtggccgcagcgggtgcggaaaaacaacgattacaaggctggtgaatggactgatccctcagttttatcagggggagcttcatggccgtgtgctggtagatggtcaggaaatcagcaatatccccatgtatcagattgccgctaaggttggctccgttttccaaaatccacggacgcagtttttcaatgttgatacagacagtgagattgcctttggaattgaaaatgaagctcgccctcctgagaaattagctgagcgagtagagcagacaactgaagatttgcatattcaaaagctgcgaaacagaaatatttttgagttgtccggcggagaaaagcagaaaatcgcctttgcttctgtttatgccatgaacccacagatttatctattggatgaaccatcctctaatctggatatgacttcgatccaggaactaaaggaacatttgcggctgataaaaaaacagggcaaaacagttttgatagcggaacatcgtctgtactacctgatggagttggctgaccgaattgtttatctggaaaaaggagaaatcaaaggaatatacaccccggaagaattttggcagctatctgaacctgatcgtgaacacatggggctgcgagctgttgatctacaggcggtattcccgcaaaaagcccacttgcctgcgcctacccctgtattggagctgcggaatgtgacgctccgttacaagaagcaaacaattttgcatgacattgagctatccgccggaaagggcgaagtgattggtgttgtcggccacaacggagctggaaagactacattttcccgcgctctctgtgggcttcacaaagactgcgatggacaatttttgtgggaaagcgagccgattgagcgtaaggaaaggctgaaacgctcttacatggttatgcaggatgtgaattatgaacttttcgctgacagcgtggaggcagagtgctcctttggtatacgcaatccagatcaaacactggtaaatgcaactttggaggaattaggccttacccaatatcgggagcgccatccaaacacgctttctggcggtcaaaagcaacgagtagctgtagctgttagcatgatttgtgggaaagatctgctggtattcgatgaaccgaccagcggccttgattttgacagtatgacgcaggtggcgggaatgatccgccggttgtccaatatgggaaaggttattttcattgtcacccacgattttgaatttgtctgccgtacctgctcccgtgtcctgcattttgacgagggcgaaatgcccgatgatgtaccagttacaatggatgccctcccgaaattgagagagctgttctctgtttcagatggaaaggagaggtgatctatgaaacagaaaaaagaaaacagagtagctttgctgctccactgggccggtgagcaaaaaatatggctgttcctggcaatttttctatcggcggtcagtggtctttgcattatcgtcccttacattggaatttaccggctgatggacgccaccttcaatcatacctgcacgcaggaacttgttgtacataccgtggtaatgattgcagtggcggtaactttgcggtttgccctgtttggctgttccggcgtagcagcccacaaaggggcctatggcgctcttttcaaagtgcgctgcatggttgcagaacacatggccagagcgcctttaggggccttgaatgaacggcgcactggggacataaaaacggttctgaatgaagatattgaaaagttggagctgtttctggcccataaccttcctgaccttgtgtgctatctggtggggccggtagtcatctttatttatctgatgaccgtcaatattcctctggcattgatttccctggttccgctgatccttgctgttgttgtaatggggatgatgttccgcaatacggatgacctgatggaacgggccaatcactccattaccacactgaactcggttatgattgagtacatcagcggcatgaaattgattaaagcctataacatggggagcaaatcgtttcaaaagttttcagacgctatccaggaagaaaacgccatgtggaatgaaacttcccggcgcatggggccaccttatgcggcctttgttgttatcatcgaatgtgggatgttgatgatggttccaatcggcggaatgtttttcctgaaaggctcactggctgccagcgcatttttgctattcgtctatgtaggttccatgtatctgacggaaatacgccccctacaggaactggggactaattttgccaatgtgctgaacgctgttactaagaccaaagagatactggatattccaatttatgagggtggagcggactttccccaaaatcacgatattgaacttcggaatgttcggttttcctatgatggcaagaccgatgtactgcaaggcgttaatctcaaaattaaagatggtgaacgcatggcccttgtgggacagtctggtgccggtaaaagtaccgtgattgagctgatctcccggttctatgatgtgcaggagggcgaagtgctgattggcgggaaaaatgtaaaggaactcaattatgatactatcctaaaaaatgtcgccattgtgttccaaaagaccttcctgacccgtgacagcgttttagaaaatatccgcatgggcagtaacaccactctggaaaaagtacggaccgccgcaaaagaggcgcagattgatgatttcatcatgtctttgccggatggatataacacgaaggtgggcagctttggctctcgcttctccggcggtgaaaaacagcggattgccattgcccgcgctatcctgaagaatgcccccattttgatcttagacgaggccacaagcgcctctgacccggaaaatcagatggagattgacaaagccattcaaaatctctgtaagggaaagactgtcattgtggtagcccatcgtttgagcgcgttgaagatgtgcgagcgtgtagcagtggttgaaaatcacacaattacctgtgtcggaacccatgaggaagtccgaaagaacaatgcttactatcggaaggcgtgggaggactacgaaacagcccggaatattacttatcagttggagggaggcgagcagcatgagtgagcatgatgtattgaaaaagaaccgtaatttttatattggcgttggcgggactgttctggaagggcttctctccggcagcctgtttatgctgctttactctgtcatgcagtttttgtggtcgggacaatttgacatgaaccgtgtcctggttctgacctgtgtgatcgcggtggtttttcttcttcgtatcctgatttacagctatggctataccaaagcgcagattggcggtgcagcggtcagcaaaaatattcggctttttatgggcaaccatttgaagcgcatcccactgtctcgattttcgcaggggcagaccggcgattatatcaacaccattacaagcgacgtaaacaactacgaaaaaatcctgacccataaagtcggagatttcgcaaagaattttgccctgtcattgatgttgattgtctttgttatgacgctctatgttccggcaggaattatcctgctgatagccgatcttcttttaatccccggcctatggctttctttccgcatggtacggaaatatggaaaagaaaagaacgatatttgtgcggagaacgtcagcagcattgttgagtatgtttctggtattcagactttccgagcttatggtgtaggcggtatgaagaacgaaactgttatcaacgccatgcgggagttttcccggatcagctttgtgtacgaatcaaaagtgcttcctattggtgcggtctttggtattttgagttggctgtcctgcccgctggttatcttgctggcctatgcaccctgggtcgcagggacactgagcacggtggactaccttttgatttgtatgctgcccctgttctgtgcaaagctggctaactcgatttttgtagaccttaccagttataagaacctgatgatctcgaaaaacaaaatcttgagtgtaatgaatgagccggaggaaactggcagcatggagccgcttcacacagctacccatgaaatcacatttgacaatgtagattttgcatatgttcccggtgaaccggtactaaaacacgccacctttacggtgccagatcaaaagctcacggccattgtcggagactctggctccggcaaatctactattttgaacctgattgcaaaatattatgaagcaacgggcgggacgatttctattggcggtaaacccattaaccatgttgccgcagagcgtgtactggaacaagtttctatggtagaccaggacgtatttctttttgacgataccatccgggataatatccgacacgcccgccctaatgctacggacacggaaatcgatgatgcttgccgggaggctaactgtgacagcttcatccgtaagatggaaaagggatacgatacgccgactggtgagaacggaaatcttctctctggcggtgagcgtcagcgaatttcaatagcccgcgctatactgaaaaatagccccatcctactcttggatgaagcaacagcatctcttgacattgaaaatgagcttgccgtaaagcaggccatcgctaatctattaaaagagaaaaagacagtggtaatgattgctcataccctttccattgtcaaaaacgctgatcaaattcttgtaatgggtgatggcaggattgctgaatctggaacccacgaggaattgcttgcgaaaggcggaaaatatgctgctatgtggaacgcagagcaaaaaatatcggcttgatagaagctaaagaagaataattgcatagcgcatgaacctgccccgactacggggaaagaaaaaaacgctggctggggcaggtgattttgcgcgcctattttaagttattatcctaacggcggttttgagaaatcagagccgccgtttcttgcgtatacctaaaaggaatcttccgcatctatccacatttgcatcgttccatcaagatacaatcttgcatactcaagtggttcatcaatggcaagtgcgtttaatgcacagtcagatccgggagtagttgttaaattcttctccgcttcccagcagtcaatgcggagcatatagccagcagaagtataaacatcaatgctgttgcgttgtggattgtattctgcaaatatcgttctcatcgtatcaaatctccttatcgttcaatcaatcatttgttgcaaaaatcagaagcatttcaatcagttcaccatgtcacttttattttgtgttatactgttttataagattttctttcccttgttttttcccttatcagagttcgtaaaaactcatgggacaatataatacaagggaaacaataagggaaagctcacctgcgacaaacttagtgttttcaagggcttgagagatatttgataataaaatataacagttattaaatccctttgaatatatgaaatctcaattcaagtttagtatattaaaaatatcctgacaagcacagatttttctgcatcctgtcaggatattctgtttttaaattccgattttctcaaagaagcttatgctcctatatgcaatcttccttctattatttatttctcagatattcatcgatacctttggcacctgctttaccagctcccatagcaaggataactgtagcagctcctgtaacagcatctcctccggcgaatacgccttctttagatgtctgtccattctcttcctctgcaacgatacattttctgcggtttgtctccagaccttttgttgtagaagagatcagcgggtttggtgatgtaccaagagacatgataactgtatcaacttcgatgtcgtactcagaaccctcaatttcaaccggacgtcttcttccggaagcatctggctcaccaagttccatcttgatcactgtcatgcttgtgatattaccgttctcgtcaacgttgatcttcttcggatttgtaagaagatcgaagatgattccttcttcttttgcatgatgaacttcttcagctcttgcaggaagctctgcttcacttcttctgtatactacatgaacttctgcgccaagacgaagagctgttcttgcagcatccatagctacgttaccaccaccaacaacagctactttcttaccggcagcgatcggtgtatcgtaatcatcacggaaagctttcatgaggttacttcttgtcaggtattcatttgcggagaatacttcgtttgcattttctcccggaattcccatgaacattggaagtccggcaccggatccgatgaatactgcctcgaatccttcttcttccatcagctgatcgattgttgtggatttaccgataacaacgtttgtctcgaatttaacaccgagctcttttactttctcgatctcttttgcaacgactttctgttttggaagacggaactcaggaataccatatacaagtactccaccgagttcatgcagagcttcgaatactgttacatcatatccgagttttgcaaggtctccggcacatgtaagtccggacgggccagaaccgataacggctactttgtgaccgttcatagtctcagcgccttctggtttgatatcgttctcaagtgcatagtcagcaacgaaacgctccagttttccgatagaaacaggctcacctttgattccacggatacattttccttcacactgggattcctgcgggcaaacacgtccacagatagccggaagtgcgctggatttaccaatgatcttgtaagcttcttcgatatttccttcttttacctgctggacaaatgccggaatgttgatggatacaggacagccctggatacattttgcattcttacagttaaggcatcttgtagcctcttccattgcttcttctttgttataaccgagacaaacttcttcaaagtttgttgcacgtacttttggatcctgctctcttacaggtacttttttcatcatatcagccattattcgtcacctccacaatgtccgcatccgccgtgatgtgtatcgccttcctgaagtttcagcatcgcgcgtccttcttcagatttgtacatctggcttctcttcattgcctgatcaaagtcaacaaggtgtccgtcgaactctggtccgtcaacgcatgcaaatttgatctcgtcaccaacctgaagacgacaggcaccacacatacctgttccgtctaccatgatcgggttcatgctgacgattgtcggaatctcaagtttctttgttaagagacagacgaatttcatcatgatcatcggtccgattgcaacgcagacatcgtatttatttccgttgtttacaagttcttctaccatagttgtaaccattcctgcgtgtccgtaagaaccgtcatctgtacatgggtagtagttgcctgcaacagcttccatctgatcttcaaggatcagcatatcttttgtcttagcaccaacgataacatcagcatcgattccgtgtgctttcaaccattttacctgtgggtaaaccggagcagccccaactccaccggctacaaacagcatcttcttattcttaagggactcaaggtcttcatgaacaaactcagaagcgcatccgagcggacctgtgaagtcacggaaactgtctccagctttaagttcccccattttcgctgtagaagctccaacttcctggaaaacgattgtgattgttcctgcttctctgtcataatcacagattgtcagcggaatacgttcgcctttctcgtccattttaacgatgacaaactgaccaggctgacagtgacttgccacacgtggtgcatgaacatccatcagataaatcttatcagccagtttttcagcttttaatatcttatacatgtttctcctccttgtaaataaatcgacgttattatcttcaaacattgtgtaaacaataacaactcgctctttgttaataatacgacacttcagctatgaattcaagtaaaacatacgggcagacacacaatttcatgcatctacccgtatcgtttaggacaagtttacagcgttatcttattttataagaacactgaaacctttattaatttttgattttagaaatcaacttctgttccgtagtatgtacatgtaagaagtttagccatagcagcaggatcgattgcacgtgggttggatcctgtacaggcatctcctacagccagttctgcaatcttgtcaactttttctttgaattcttcttcattgattccgaagtctttcagagtcttaggaatgttcagtcttacattgaactcatcaatcttctcaacaaggctgttgatcagagcctgctcagatgttccggcaagtcccattctgcgtgcgatttcagcataacgttttgcagctacaacgtcttttgcgttgtatttgataacgtatggaaggtaaattgcgttagcacatccgtgcggaatatgtcctgtagagaatgcagcacctgttttatgagccattgaatgaacgataccaagtaatgcattagagaatgccattcctgcaaggcactgtgcataatgcatctgctctcttgcaaccatatcacatttgtaagatcctggcagataatcaagaaccatctcaattgcctgcagtgcaagtggatctgtgaaaggtccgttcagtgtggatacatatgcttcaattgcatgtgtaagagcatccatacctgtatatgcaacctgtttaaccgggagtcctgcaacaaggtcaggatcaacgattgcaacatctggtgtgatgttgaagtcagccagtggatatttcacaccagtctgatagtttgtgataactgagaatgctgtaacctctgtagctgttcctgaagttgtaggaattgctgcaaatttagctttctgtctcagttccgggaagctgaatggtgtgatcaggtcttcaaaggagatctccgggtactcatagaatgcccacatagctttcgctgcatcgattggtgatccaccacccatagcaacgatccaatccggctcgaaagcacgcattgcttcggcacctttcataacagtttcaacagatggatctggctcaactccttcaaacagctgaacttccattccgccttctttcagataattaactgctttatccaggaatccctgacgtttcatagaaccgccaccaactacaagaatggctttctttcctttcaggttcttcagttcttccagacatccttttccatgataaatgtctcttggtaagcaaaatctactcataacaaatctctccttttttatgtagtattgttatttttttaacagatattattataactctgtatacgaaaaaaagcaaccctattttggaaaatttacataacattttccaaaatcaaggttgctttctagttactttacacagtttacttaatatgtagtaatatagtttcgtgttgttacttccgttgcttttccatttttatcgttcacgagaattgctgaaaaagttgtttgtgaattttctggcatatcaatcgggtcagtatatttctcagaggatgtggttggagttgaaccgtccatcgtgtagtatgccgtatatccatccggtaccgtaatcgtgatctgagtggctgtactatattgtccggttgatggagaaactgccggagcgtctacaagtggaaattcaatggaatatttcgcactggaaacagcacttggtattccctttttattaacagcaattgcacggatctctgtgtcaccttcggactgaagcaaaacagcttctttgtattctgtacttgactccgtcggatcagaaccatctgttgtataataaatcgttccgcctgtagcagatgttaatgttacctgctgtacttcatcataggttccttctttcaaactgaattcaggagcagatgaaacataatcattcatagcagataatacattcttatcttcacaatcctgcaggagatcagaaatcttattcggctgttctgttttctcatagaattttactgcagctttatagagatttacattcgacggttgtgtctccagtgcgttgagatagacgctctctgcactgtccagatcatcctgggcaacatagatattagcaagtccggtataagcctctgcctttgatttatcctttataattgctctgttaaaataattctctgcagaagtatagttactattctgcagtgcggcattcccttttttgatcatgcctgtataggaattctgatatccgatataaattccgacaccaaccagaagaatgagcaggaaaaaaaccgtaagtaatttttggcgtttttttctggcagcttcttgttttttgatctgctgcaggcgtctgctttcagtagatgtccggcgcagattctctgttgactgacgggcatcctgataacgctttgcatctgttttctgacgttgtctttgcgctctctggcgccgtagctgctctcttcgctcttctcttactttatccagttccgcctggcttaagacgcgtgtggaattaggattcgatcgttgattttgccgatttctgttttgctggttttggctcacattctgtcttcggactacatctgcctggatctgacgtgtagctccggctactgagcctttcacttcgcgtgcgagtacatcttccagagggttataatctggtacaatctgtacttcagcaccgcatacgggacaaatcaactgatcgtctggtatatttgctccgcaatgtgtacacctcatttacaagttcctcctacttacgaactgtttcaacacaattattcatcagcatcgcaattgtcattggaccaacaccacccggtaccggcgtgattgcagaagaatgaggttcaacatccgcaaaatcaacatctccgcaaagatggttcgcttcatcacgatgcattcctacatcgatgacaacagctccctctttgatatattcagatgtgataaaacgctcttttccaattgcaacaatcaggatatctgctcgttttgctacttctttaagatcttttgtgcgggaatgtgcaacggttacagttccattttcacgaagcaaaagggctgccattggtttaccgacgatattgcttcgtccaatgatcacacattcttttccttcaatcgaaatattggatcttttcaaaagctgaatgattccggccggagtacaggataaaaatcctttttctccgatccagagtcttccaacacttacaggatggaatccatccacatccttatccggtgaaattgtacggatgatcttatcttcatcaatatgatccggtaccggaagctgtacaagaattccgtttacgctttcatccgcatttaactcttctactaacttaatcagttcttcttccgaagtctcttccggaagttcatatgatctggattctaccccgatataggcgcatgcctttttcttgtttctgacatatacagaagaagccggatcacttcccacctgaataacagcaaggcaaatatcaatgccttctgccttaaactgtgcgacttcttctttcaactcatctttaatctgctgagagattaatttaccatctatcaactgtgccatgtgtatctccttaattaattatctaactccatgaaaacaattggcattgccggtcaaaaaatactatgaccggcagccaatcataaaaaactttagaaaagtccggtgatctttccgtcatctgtaacgtcgattccgtttgcagcaggaacttttggaagtccaggcattgtcataacagcgcccgtcagtgcgacaacaaaaccggctcctgcacttacatatacctcgcggatatgaatatcaaagttttcaggtcttccaagctttgtagcgtcatctgaaagagaatactgattctttgccatacagatcgggaaagaaccaaatcccatagattcaatcttggcgatctgtttctcagctgcaggttcatatacaacatcatgtgcgccgtaaatctcctgtgcgattgtacggatcttgtctttcagagaaagctcatcattataaagcgtatggaaattactttcttttgtctcaagtgtctcaagaaccttctgcgcaagatctaaaccgccttctccgcctttctcccacacttctgagagggcaaactcgcatccgcgttcacgacagaatttttcaataaatgcattttcagcatccgtatctgttacaaatgaattcagtgtaacgattaccggtacaccgtatttctgaatattttcaatatgtttctcaagatttacaataccttttgcaagggcatccaggttctcttctgcaaggtcagcctttgcaacgccaccgttatactttaatgcacgtactgttgcaaccaaaactactgcgtctggtttcagacctgccatacggcatttgatatcaaagaatttctcagcgccaagatctgcaccaaatccggcttctgtgacagtgatgtcacttaacttcagagccatctttgttgcacgtacactattgcagccatgtgcaatgtttgcaaatggaccgccatgtactaaagccggtgtatgctcaagtgtctggatcaggtttggcttgatcgcatctttcagaagtgtagccatagcacctgttgcctgaagatcatctgctgtaacaggttctcccttgaaattgtaagcaacaatgattcttccaagtctgcgtttaagatcagcaagatcatctgcaagacagaggatcgccatgatctcagatgccactgtaatgacaaaatgatcttcacggaccataccgtctgttttgcgtccaagtccgacaacaatatttctgagaacacgatcattcatatcgacacaacgtttccatacaacctgtcttggatcaataccaagtgtatttccctgctggatatgattatcgagcattgctgcaagaaggttgtttgctgaagtgatcgcatgaaaatctcctgtaaaatgcaggttcagatcttccataggaacgacctgggcatatccgccaccggctgctccacctttgattccgaaacatggtccgagagatggctcacgaagcgcgatcattgctttttttccaagttttgcaaatgcctgtccgagacctacagatgttgtagtcttaccctctccggccggagtaggattgattgctgttacaagtacaagctttccatcctcgttatctttgattctgttccagagttcatcggaaagttttgccttatattttccataaaattcaagttcatcttctgaaataccggcctgtaccgctacctctttgatgtgtttcatttctgcttcctgtgcaatctgaatatctgttttcatctttccctctcctttgtatcacttttggtgtttttagattttacgaagtctgattctgcatatattctgcaaattcttcttttgtcataagcacttttcttggttttgttccttcctccggacctacaacaccagcttcacatagctgatccataattctggcagcacggttgaaaccaatcttgaacatcctctgaagcataccaatcgatgctttttccttgtcgatgatcagattccctgcatctgcaaaatagacatccctgctgttctcgctgtcctgctgtcccggaagcattccctgacccggaagatctgcgctgcttgaaatctgttcttctagttcattactgtacgaggtatttccgttcttgtcaatcaaataatcaacaactttttgaacttcttcgtccgaaacgaaagatccctgcaccctgacaggttttggatatccggatggataaaagagcatgtctccctttcccaggagcttttcggcaccattcatgtcgataattgtccttgaatcgacacctgatgatacagaaaaagcaattcgggaaggcatgtttgctttgatcaatccggtaataacatttacagatggtctctgtgttgcaagaatcaaatgaagtcccgctgctctggccaactgtgccagacgacagatagcaccttctacttctcccggagcaaccatcataagatcagcaagctcgtcaatgataattacaatctgaggaagctttttctgaatctccggtccggtttccccatgcttgaccttttcattaaagccctttaaatcacgtacattgtactgtgcaaaaagtttgtaacgcttttccatttcagcaactgcccagttcaaagcacctgccgccttcttcatatctgtgacaaccggaatcatcagatgtggaattccgttatacacacttagttccacaacttttggatcgacaaggatcagtttaacatcatcaggatctgccttataaataacactcatgatcagagtgttgatgcagacagatttaccggatcccgttgcacctgcaacaagaagatgcggcatcttggcgatgtcagtcacaacaacctttccggcaatatctttaccaactgcaaatgaaattggcgatttactgtttttgaactcttttgactccagcagatctcccagcataaccgctgtattttcactgttcggaacttcgataccgaccgcggctttaccagggattggagcttcaattctcagatctgcaactgcaagatttagcttgatatcatctgcaagtccaacaatccggcttacttttacgccctgttccggttgaagttcatatcttgtaacagatggaccacagcttgcgtttgttacatgtactccaactccaaaattctgtagtgtctgttccagttttaaagccgtggcacgaaggtgttcatccgaatcaccgccgcctttcttccccttctttaacagattcagtggaggtgtatgataaaccggccgtggtttttgctcctgttcccgtatggtcagttctacactggctgtctctgcggcaactgcctgcgcgtcttttttgctgctttttttggaatgctcctgttttatctccgggctattttcaatcataggatccgtagccggatcatgttcagaactcatctcgttttcttgtttggaagcgggtgtctgtaccggttcaagatgcagtgcatcgtcaaacggaatctcttcttgtacatccattgccggttctgctctgttaatgacaaaatgatcttcaaaggaatccgtcagatcttttgaatccggctctttctccgggacaagttctgtcatttcaggtgattttggagtccgcccaaagccaccaacaggtgattcttcctctgaaagaagcgttgtggcgaacgtaatacctgatgctttaaggtctgtccgctttgtgcgtttctttttctcacttggagaagatgcatcagcctgtaaagtttcgactttttctctttgcttcaacgcaagtgcctctttgcgggcatcccgctccagtgtgcggatctcagcagtttcctgatgtttccgtttcacttcctggtaagctttctttccatgtcttccaagtggagctaataaagaacgttctgttaccagaatgatacaaatgattgagaaaatgatcaaaataacataagtacctgcctctccgatcagtggacataaaatactgatcagaattccgccaagtaatccacccgcatttttatcagcactggaatctttgtagtaagataaaacagatgtcccggcagtatatggatgaaacatcaattctaaaattccacaaaggagaatgaccagaacaattgcggcacctacttttatgtaagcatgaggatttcctttattggaaatataaaaagcaactgctccgaaaaatacaaatggaaataaatatgccattgctcctacaagtccaaatcctacagaagaaattgctcctcccgctatgccacccataccaaaattactcaggataagaaggatacagatggcaagggaacccaatagaagaatctctgaacggatttcctgactttgtgctgtatttatatgatttgaagttctttttgtcttactgccagaacttttctttgtggaggcagaagctttttttgctgtcgatgttttcttagttgttgcattttttgctgctttcgctgtgttgttcgtagaactttttttcgtatttgtagattttgcagccatctgattcccccttaattattataccattgtactgattcaatcaaacgatagattgaatacatactatttcaagtataacatcaattaaaattcatgtcattacaaaatttctttgatcagatgccatttttttgttctatatttacatttccgaaggtttttcccgtttttcatcaatcaattcatagagttttttaaatgcctggtgaatgcctccgacttcgtcgatgatcccttctcttacagcttcttctccttctaacagtgttcctacatcttttacaagctgcgtagggttcaacatcagatcaacaagacgtttttctgtgattttagagtgtgcagcaataaatctggcaattctgtcctgtgtacgttccatatttctcagactctgtgtcacaccgataaaagtaccgtttgaacgaaccggatgaacaaccatggttcctgttggtacaataaaggaataatctgccgaaacagcaagaggaccgccaatagaatgacttccaccaagaacaagagaaacggttggttttcccaaagaagctatcatctccgcaattgcaagtccggcttccacatctccacccagtgtatttaataaaatgagaaccccctctacttcatcgctttcttcagcttcagccagttgtgggagtaaatgttcgtactttgttgcttttgtattatttgatactgtttcatgtccttcaatttcacctataattgtcagaagacgaattttgtaattctttttattttcatttaacattaacgcaccaaattctttgatttcatctgatttttgctttttttcctcgctcatataaatatgcctcctgttgaaagtaaataaatactattactagaatgcacagaatacgggaaaatatgtattgtatccaattctgcatatcaatctccacaatttaagcaaaagagctgactactgtttaaaacctacaattcggatacaaaaaaacaggaggtatggatacaaaatcatgggaatccatacctcctgaatcatatgttatttatattaatcttccagtgcctgttctacatcggcaatcagatcttcaatattctcaattccaagactgaaacgaatcagatctggctgtacacctgcttccaacagttcctgctcattcatctgtctgtgtgtatgacttgcaggatgaagtacgcagcttcttgcgtctgctacatgagttacaatcgcaaccagtttcagtttgtccatcatcttaactgctgcttctcttccgccctttaatccaaaagtaataacaccgcatgttccatccggcatatatttctgaacaagatcataatccttgcttcccggaagtgatgggcagtttacccatgccactttctcgtgtccctggagatactgtgccatctttacagcgttctcacaatgtcttggtactctcaaatgaaggctctcaagtccaaggttcagaagaaatgcattctgaggagactggatcgatccaagatctctcatcagctgtgatgttgcttttgttatataagcagctttgccaaacttttctgtgtatacaattccgtgataagtctcatccggtgttgtaagtccggcaaacttgtctccgtaagcagcccagtcaaagttaccgctgtcaacgattgcaccgccaacacaggctgcatgtccatccatgtattttgtagttgaatgggtaacaatatctgcaccccattcaaaaggacgacagttgatcggtgttgcaaatgtattatctacgattaacggaacatgatgtgcatgtgcagcttttgcaaatttctcaaaatcaaaaacagtcaatgccggattggcgatagtttctccaaaaacagctttcgtattctcctgaaatgccgcattcagttcttcctctgtgcagtctgggtctacgaaagttgctttcacacccattttacggattgtgtgagcaaacagattgtatgtaccgccatacaaggcagatgcacatacgatatgatcaccttcttcagcaatgttcataatcgcataaaagtttgctgcctgtccggaagaagtcagcattgctgctactcccccctccatatcacagatctttgctgctactgcatcattcgtcggattctgaagtcttgtataaaaatatccggactcttcaagatcaaaaagtcttcccatctgatcactgctggtgtaacggaatgttgtgctttgtacgatcgggagcacacgtggttcaccgtttcccggattgtaaccggactgtacacatttagtttccatcttgtaattactcatcattgtcccccatttcttataactgattattcgttccagttatggtatacgtcctgaacatcatcatcttcatcaagaagatcaagtgttttctggatgtttttaatatcttcttcttttgtaagatcaacatatgtctgtggaatcattgtaacttcggcagaaaccatagggattccggcttcttccatcttcagacgaacatcactgaagtcttccggtgctgttaatacttcgtagctgtcttcttcttcgttaaagtcctcagctccggcatccagtacagtcatcataagatcatcagcgtccatatcgcactcttctttatcaataatgatctgtcctttttcatcgaacatgaaagatacacatccaggtgttcctacgtttccgcttccctttgtaaatgcatttcttacattggaagctgtacggttcttgttatctgtaagagtcttaacgataatagcggttccgttcggtccatatccttcatatgtaatacgctcatagttatcagcagttccttctccggcagcttttttgatatttctctcgattgtatcattcggcatgttgtttgcttttgcttttgcaataacatcacgaagtctgctgttgtttgtcggatcagcacttccaccttccttaacagcaattgcaagttcacgtccgatctttgtaaaaatctttcctttcgctgcatcattcttttctttcttatgcttgatattcgcaaatttagaatgtcctgacatattctgattctccttttctattgtatcaatgtattttatataaattcacttgcatttacagatacacactaagtcctgtaaagcactatccttatgattttaccacgctttttttgttctgtaaagaatttggttggatttatgtagtaagatccagactgattcttattgcttggtcaatttttttcattcgttcctgatcgatatgacagacatattctctcagtcttttcttgtcaattgtacggatctgttccagcagaatgactgaatttttcataatattataatcatttgtacagatttcaatatgtgtcggcaattttgccttattcatcttcgacgtaattgcggcacagatgatggttggactatgtctgttgcctatattattctgtattataagtaccggccggattccaccttgttcggaaccaacgacaggactaagatctgcgtaataaatgtcgccccgcttaattaccaattcattcacactccgatattccagttacttttcgtatttgttctctgattcttctcagaaccttttgtttttcttctaagaacatactaaagtatctccggttttatcggatgtatgcatatcaaccagattctttcaattattccggttattcgaaataatcaatctgttttacgatcgtaccgtttttataatactctctcggaacacgcttgctcagatcacagacaaattcgtaattgaatcttccactcagatcagaaagatcttctacacggataattgcatccttgtcttttccgaccagagtaaccggatccatgaattttgcttccggaatctctgttacatctaccataaactgatccatgcagactcttcctacaatatctgcacgttttccatggataagaacatagcctttatttgaaagggaacgcggatatccgtcaccgtatccgacaggaatcgtagcgatccgcatcttctttggcgcgacgaaagttccaccgtaactgatggaagttcctttttccacatcctttacaaagctgatatggctgattaattccagtgccggtttcaggtcaacagcatcttttttcacttcatctgacggatacattccataaatagagattccggctctggcaagatcatgcttcatatccggaaaatcaataattccggcactgttatcacaatcataataggaaatctgaatgccatttgtttctaactgttctttcatccagaggaatttttcatgttgggcaaatgtataagacttgtcaaattcatctgcctttgcaaagtgtgtgaacattccttccattttaatattaggaagtttgctgattctggaaattgtctcaacactttctttgcttactttgaatccaattcgtcccattcctgtatcaatttttatgtgaagaaatgcggtctttcctgaccttacggcagcctcagccattcccttggccatctcttctgtataaactgctgcacggatttctttttcaaccatttcttcatactcatcaggaaaaacacagccaagaatcaagattggtttcttgattccatgtgctcttaaagttcttgcttctcccatgcatgctacagcgtagccccagatataaggcgtttcctcaaacatttccgcaagaggaactgctccgtgtccgtatgcatccgtcttgataacagctattaaacgtccttcctgaccaatgcgatttttcatctgttccatattatatgcaattgcgtccagattgatccgggcacatactctgttatactgtttcataatttatctgcactcctttgcattcttcattgcatcggccataccctgaatcaggtctctggctaatacgctgtaacttcctttgctctttttcgcttcatctccaccacaggcatgtaggaaaactccaacagtagtggcttcaaatggtgccatatgctgtgcaagaagtcctgcaatcgttccggcgagaacgtctccggaaccaccttttgccatagagttattaccagcgagatttacaaatctctgccgatttgtctgtgcgacaacagtacgactgtcttttaacacacagattatggatgattttgtatccggtccggattgttttatgatctgatcaagtgcctggaagcgatcttccatgatcgtatcaatactccatccggtcagccttgacatttctttcatatgtggagttaaaatcacaggtgcacaacattgatttaataactctatattcctgctcagtaaattaagtccatcggcatctatgacacatggacaggatacatttttcaatacatttttcaatatcttttcggaaatctgtcccattccaagtccacagccaatacaaaccacatcagcccagtcaagaagatgagacagttgactgtcatcataagaatcatagcaggatatgattgcctccggaagaagttcctgcagtgccagacggttttcacttgctgtataaatctgtactagaccggcaccaactgtataggcagcacaggcagaaagaaatgcagcaccagccatcccgggacttccggtgatcataagaacttttccataacttcccttgtgtgaattcatcattctcgaaggaagaagttttccaagatcatttttgtcaaaggtataacaaacatccaggcgattcgaaaaatatttcggatcaattccaatcgcaaccggaatgctctctcctgcataggacttgccagggaaaagctcacagcctaattttacacatgccatacatactgtaaggtcggctcgaaatgctgttccaagaatctttcctgttgcagcacagattccggatggaatatcaacagcaactttttctgcatcctgaagattcatccagtcgatcacatctctataatgtcctgtgatttcacggcagagtccaacaccaaatacagcatcaattattacagtatattcttcatccgggaattctgtgaatacagaaatccccatattttctacaatctgtttctgacatcgacattcttcacttaaagaagcttctttccctgcaaatagtacatctgcatgctttccctgttcggttaagagccttgctactgcaaatccgtctccaccattgttgccgcttccacaaacaatcagacttttttctgtggaaatatttttcttatgcattgtctcgacaatctgaagtgctgcacgttccataagtacaagggatggaatcccaatttcatgaattgtgtgtgcatcagcttcactcatctgcttcccatttggaagatatctcatgcttatcgcctgacctttctaacattattaattccttttaacatgaacagatgctgcgaaacctccttttgtcagttggtcccacagcatccttgcagctttgctagattctattctttatcctgctgacaaaggttgtaagataacttcatcagtgtgtcagataaatgtacgttctcaacgaccacatcctttggaagggaaaggtctgtatgtgcaaaattccagatccccttcacaccgttatctaccagaatatcagccacttcaattgcttttgattttggaagtgtcagtgcagcaatttcaatgtcattattcttaagaaaatcttccagttcatcaaccatacgcacaggaatccccctgatcgttacgccttccagtcgaggattcacatcgaaaagacttttcagaataaatccgcttctttcgaaggaagcatagtttgctagtgcctgtcctaaattaccggcaccaatgataataaaattatgacatctatccaatcctaagatctttccaatctctgtataaagatatttcacattgtatccgtatccttgctggccgaatccaccgaaattattcaaatcctgacgtatctgtgaagccgttacatgcatcttcttactcaggtcactggatgaaattctctctacgccagcctccagcagatctcccagatatctgtagtacctcggaagtctggaaatgactgcacgtgatatctttctttgttccaatttttagccctccactcttaaactaccctttattatataaaagagttaaagttctgtcaaacttttgttttgcaaaaacctttaaaatccatatattttccttgtattttcgacatttttctatataatgataatgttagaagtcaaaaaacgaggtgaaaatatatgatactcgcatgtcacaatatagaaaaagcgtttggggaacgcgaaattgtacgagacggctcctttcatattgaagatcgtgagaaagctgctcttgtcggtgtgaacggcgccgggaaatcaacaatccttaagatgatcatcggagaagaacctcttgatggtggagaggttattctcgcgaaaggaaagacactcggttatcttgcgcagcgtcaggatttaaaatccggaaataccatttatgaggaagtaaaaagtgcaaaagcggatatttttgcaatggaagctcagattcgttccattgaacatgaactgaagcatctggaaggtgaggaattgcagagccgcctggagacctacaatcgtctacagtctgaatttgatgcaagaaacggttatgcctgcgaaagtgagattacaggtgtattaaagggacttgggtttacggaagacgattttaataaacagacagatacactttcaggaggtcagaagacccgtgtttctctcggaaaattactgcttacaagtccggatatcctcctgcttgatgagccgacaaaccacttggatctgaattccattgcctggctggaaacatatctgatcaattattccggagcagtatttatcgtctcccatgaccgttatttcctgaatcgtgttgtcacaaaagttgttgagattgacaatgcacaggttcgcatgtaccttggaaattataaagattatgcaatgaaaaaacagcagatccgagatgcacagctgaaagaatacatgaatcagcagcgtgagatcaaacatcagcaggctgttattgataaattaaagtctttcaatcgtgaaaaatcaatcaaacgtgcagagagtcgtgagaaaatgcttgacaggattacgccattggacaaaccggttgacagtacgaaagaaatgcattttacgctggaaccatcgcagatcagcggaaatgatgttcttacagtggaacatctctcaaagcaatttgacagtcaggttctcttccgtgatatcaattttgaaatcaaacgtggcgaacatgtcgctgtgattggtgataacggaaccggaaagacaacacttttaaagatcattaatcaggttatcgcagcggatcagggtgaattcacacttggatccaaagtgacgattggttattacgaccaggaacatcacgtacttcatgatgataagaccatttttgatgagatttctgatgactatcctgatcttaccaatacacagatcagaaatacactcgctgcattccagtttaccggagatgaagtgttcaaagaaattcatacgttaagcggtggagaaaaaggccgcgtatcacttgccaaacttatgctttcggaagcaaattttctaatccttgatgagccaaccaaccatctggatattacttccaaagaaattctggaagaagcattaaataactacagcggaacgatactttatgtatcccatgaccgttattttatcaatcagaccgcctcccggatccttgaactggtgaatcagacatttgttaattacatcggaaactacgattattatctggagaaaaaagaagcactgacacttgcttatgtttctggaaatgaaacaaatgcagaaaatgtatccaattcaggcaattctgctgcatccactcctgcttcggattcaaaattaagctggcaggaacagaaggaacagcaggcacgtgaacgtaaacggaaaaatgagttgaagaaaacagaggaagaaattgcaaaacttgaagatcgcaacacagagattgacgaggaactgacgaaagaggaagtttattcgaactctattgagtgccagaaactttcaacagaacgcgctgcaaatgaagcaagattagaagaattgtatgaattgtgggaagaattagcagaataatgaatctgcataacagtaatcgcctgacagctactatttatggtaactgtcaggcgatttgttttaagattacattttcaaatttagtcaaacttgaatcgggatcaaggtttgtttctatactgtaccggtgtgatattatacagttttttaaatgttctgttaaaatgctctacattctgatatcccacagattctgcaatactttctacagttgcactgctgctcttaagcattgctcttgcctttttcatacggatttctttcagaatatctccgaatgtcattcctgatttttctttaatatattttgacaaatatggttttgaaaggaagaacttctcagcaagatcatccaatgtaacttctttataatttgcgtaaatataatttgtaatatctaataatctttcatccttgcatgtctgggatctctgtacgctatccaatttattcactgcaacaacgagtgcttcaatagatgctttgataatatcggcatcaactccgacaccccagtaacgcttcttgttggaaataacaccgacataagcaacagctctggaagaagatccttttgtcaaagaatgttcctcgtaaaatgcaagttcaaattcgatatcaaaataatgcttgatcgcattgctgacagcatccagacgtccgtttccaacacctgtgatcttgcggttgcttccattgtggtgaatcgttgcttctgcgacaattccatcttcttgtttaaagtggcattcatcaacactgaaaattggtttcgcattgatgtaatggtcttcaaagatatgatatacattgtctggtgtaagttcttcgtgagccttgtcggaaacatcttttacaagatatccgacttcttctctcatcttctccggtaagctgattccaaagctctgcttcaggatatagtttacgccaccctttcctgactggctgttaatacgaattacatcggaatcgtatcttctgccaacatcctgtggatcgatcgggagatatggaacagtccatgtctgacagtcatgctcctctctccaggtcatacctttcgcgatcgcatcctgatgtgaaccggagaatgctgtaaatacaagatctcctgcatatggctgacgcggagaaactttcattcttgtcacgcgttcatagacttcacaaatgtcactcatattagagaaatcaagtcccggattcacaccctgagaaaacatattcattgcaagtgtaataatatctacgttacctgttctctctccgtttccgaacaatgttccttcaattttatcagcaccggcaaggattccaagctcagcatctgaaactcctgatcctctgtcattgtgcggatgcagagaaagaattacattctctctgtcgcgcagatgcttgttaaaatactctacctgacttgcgaatacatgaggcatagcattttccactgttgtaggcaggttgatgattgctttgttgtcagctgttggctgccagatctcaagaactgcgttgcagacttccaaggcatagtcaacttctgttccctgaaaactttccggactgtactggaatgtaaagtttccatctgtttcttctgctaactctttcaaaagctttgcaccgtcaattgcaatctgttttacctgctctttatctttcttaaatacctgttctctttgtgcaacagatgttgaattatatacatggataatagcatgtggagcacctttgacagcgtcaaatgtttttctgataatatgctctcttgcctgtgtcagaacctggatcgtaacgtcatccggaatcatgttctgctcgatcaatgttcttaaaaactgatattccgtctcagacgcagccgggaatccaacttcgatcatcttgaatcctacatccacaagcagctggaagaattccaacttttcatccagactcatcggctcgatcagtgcctggttaccatctctcaagtcaacactgcaccagattggtgctttgtcaattgaatctttctttacccagtcataacatggctcaggtggcataaagtaagtcttttcgtatttcctccagttttccataatgtgtacctctcttatatttaatcaatttagttgttgttttttaacactcgtttatattagcacaggaaagtcttagattgtagtgactattttaatcacctcgcttgatcttttttaacatttcctgctttttggtatgaattttgtatagaaaacaggtagaaaatatattccacacatttttttaaggttctcttttctgcattctgtgttgtatagacgggatattcacggatcaatttgtcatttaacgtgcaacgaatcctgccgacttgcattcctttccttacaggagcatccaactgatcaggaatctcatagtcaacagaaatcgtttcatcttctttcaataggaaagaaacaggtgtcagatttgcagtaagagaaatcttggttccgtttttaccgggataagctatcgtatctgaatgtgcttttatcccattattaataaatatctgtcggacaggtaattcaatttcaaatgtcttatattgataatgatccaaagcataagtcataagagttctcatatcggaccatttataactcttattatttggccatccgcaggcaagaagtgcaacaataaatgtccgcttatctctacgcagtgcaccgacataacaatatccggcatctgaagtaaatcctgtttttccggaaagagcgccgtccatcatatttaagaatgcattatgattataacagctgaacgaccgttttccttcaacatcttgaaactgataggttttggtacgcgtgatcgtaagaaaatcttcctgtttcttagaatccataatacaataacgcatgatccttgcaagatcttctgctgtagtgtgatggattccatttgaatctgctgcatccaatccattcggtgtgataaaataagtagaataacagccgatcatccgcgctttttggttcatcagatctgcgaatttctctacacttccggcaacagcttctgcaattgcaaccccagagtcattatgtgactccagcattaaggaataaagaagatcttttaaatagaaccgttctcctgcaaccattccaagatgtacctttggctgcgtagcagcctgatcgcttactgtaacaatctgattttccgaatccattatgccgctctctaatgcaagaatacaagtcataatctttgttgtacttgccattgcccgttcttcctgtccatttttggaaaataaaatacgcccactgtctgcatccattaagacggcagacagggcgtataattgttttagctcatctggaactacctgacgttcgttagaactgacatttatcttccagttttgtcctgcatgatcagatgtagttccaaaaacatgaaccggaaaagaaattccaatgatcatgctgacaatcagtatgcgaacaaagaataaatagattctgaaataccactttttaaattctatcatcaattgatttcctgtttatattggaagctccattcttctttttattttatgattccaatgcaagttgtagaattcaaaaatcaaatatccatacggatctttgtctcatcttctgcttcttctttgaaatgttccagctgctcgggattcaatgacggaagatcatcaatcgacggtacactgaatcttcttaagaattcttccgtcgtgccgaaaagaattggtcttcccggtgcatcaagtcttccgacttcttctaccagaccatattccacaagtttatttactgcgtgatcagattttactccgcggatcttctccacctcgatcttggtgatcggctgtttgtatgcaatgattgacattgtttcaagaagaacgtccgtcagagtatatttctttggctgctttgccacacggatcagatagtcatacatttccttctttgtacacatctgataagacttgtccagttcaatgatgcggattcctctgttctttgattcgtatttcttcatcagatcctgaagtaattcttcggttgtctgttcatcctgttcgattgctttcgcaattttacttagttcaacagactctcccattgtaaataaaatagcttcaattgcagcctgaagtgtttttactcctgccatttacactacgtctccttttctttcaatcatgatctcaccacaagtagattcttgttcaacataaatttcacccagcttcatcatttcaagaatcgcaagaaatgtaacaacaatatgcattttactcttctgcttctgaagaagctgacggaaactgaaccggcggtgttcctgtaaataatcacgcacataaaggaacttatctgtgagtgaaacttcctctttctcaatcttgccaaatttacttcttaccggatccactttatctgtctgccgacgcataacttcctgaaaaactttctttaactgtaccattgtcagatccccaagtaaaaggtcaagatcaactggctctacatattccagaacttcttccggaattgttggattcttatataaaatcagatccgcatctacctggcggtctctgagctcataagacatgtatttatacattttatactgtaacagctgttcaaccagttcctgccttggatcttcttcctctccgtcttctttgacttcttttggaagaagcatcttgcatttaatatccaacaacgtcgctgccataacaagaaattcactcatcacattcagatcttcccgttgcatctgacggatatattccatgtactgattcgtaatctccacaatggggatatcgtaaatatcaactttattcttctcaatcagatgaaggagcagatccaacggcccttcaaatacttccagttttaccggtattcccataataatctccttttatctgcaaagggtgattgcaatcacttctgccggattgaacagtctcacattaaatgtatgcgttccaagccctttgctgacgatgatcgtctgttctccctccacggtcatctctcctgaatattttggaaaaagaaatacctgcggagtgatcacgccgccaattcccggcaagcgtacacatcctccatgtaaatgtccagacaaaatcagatcggcaccccattccttataagcttccatataggatggattgtgggcaagcagaatgtgataactgttgtctgcgaaattctctgttgtttcctgctgtttttcccgatttcctgcagtatgcttttctcccaggcatctgcgtacatcttcagcggtgacatccgccttgcggaattttttattcacaatcagtgggagttccaatccgctgatatgaatctgttgatttcccaacagaatatcgcaactttcattttccagaaaacgaaccccttctgcctgtaacgttttacgatactcttcataacacaaagaatagttttcctgattctctttgattctctgttcatgatttccactcgcataataaaccgggcagagctgcggcagacgactgacaaaatccagtgcctcttggtatcgcacgtcattttttgctaccagcatatctccgccaatcaaaatcagatccggctgctctgcttttataacttcgaacaatttattgttctgcttaccataaacatggttgtgcatatcacttaaaaaaataattctgttcaccgagtctttttctgctgcgcaggttatctttggtgaatgtacttcgtaatgtgttacacaaaaagaatgctgctcccgatacatttctgctaatataaccgcgcacacaatcagaaaaagaactgtgaaaaaacctaggatgctcatatcgtatgtatctcagacatctcagcttctgcaatcgccacaccggaacttgatccaatacggtctgcacctgcataaaacatcttccgtgcatcttccagtgtatgaataccaccggatgcctttaccttcatgtcagagccaaccgtacgcttcataagagaaactgcttctacagttgctccgccggttgagaaaccagtagaagtttttacatagtctgcacctgcatcacggcttacaaggcaagcctcctgaatctcttcgtctgtaagcagacatgtctcaagaatcacctttacaatcacgtcatccccggcagcagcgacaactgcaccgatatctcttcttacataatcccagtttccactcttcaatgccccaatatggataaccatatccagctcttctgcaccgtctttcactgctgctgttgcttctgcaatcttcgcagttgttgacattgctcctaacggaaaaccaatcacggtacatactttaattcctgtatttttcagaagagaggcacaaagcgcaacacaacttgaattcacacaaacagaatgaaatccgtacgtaactgcttcctcacataatccacggatatcttcctctgttgcatctgctcttaataatgtatgatcaatacgttctgtaatcattaatttaatctgcctcctgtatttttatatccattgcgggtagtaaaatttcataaaacagactgaaaattattctgagctacccgcactcgtatcctttattataaaacattttccatgttcccgacaagtgttataataatttcttccaaatcttttttagataatctccaaaatctgccttttccacaggtgttgaagcgatcagatttacggatccgatttctttcccgtttatccgataacaaatccggccaactgtgtccccttttttcacaggtgcttttacttcatctggaatttctgttacttcttcgactttcgataaatcagatccttctgtatctacataagtaaatccttcctcatattgaatcttcagatgttcttccttgccacctttcaccagaacctctggtagtttccgttcttttgctttataaatctgacattttccaaatccataattcaataaggttaccgcatccttaaaacggctttttgaatcttcagcgcccataattactgcgatcagatccacaccattcttacttgccgttgccgatacacagaactttgcctttccggtggatccggttttcagaccagtcgcatattcgtactgccggatcagtttatttgtattcgtcaggccaaattctgaagaaccacgagcagttgtatgcgtgatattttccatccagaccgtacagtagtcctttatctgcggatatttggtcatcagttcccgcgacatgagtgcaatgtctctggcactcatctcatggccatctgtatctaatccgttacagtttacgaagtttgtatgtttcattccaagtccttttgcccgcgcattcatttgtttcacaaattcttgttcattaccgcagatacattcactcatagttacacatgcatcgtttgcgcttgcgacagaaatgcattttagcagcgtacctaccgtctgcatctctcctggttccaggaatacttgagatcctcccatagaagctgcatactcggaagttgacacttcatcatcaagtgatatagttccgttttctaatgcatcaaagattaacaacattgtcatgatctttgtaacacttgccggtggccgcgcagtatctgcatctttttcaaataaaaccgttcccgtagacatttccataagaataccagacggcgcacttatttctacttcttccgcgtggactacacttgtcggaaatgtaatcctatacagcagaaaaacagtcagcagaatcactgtaaaacctttcttcatctgcaattcccccatggactattcttttaccagtatagtagcgatggaggggaaatatgtctggagagaattgacttttcaattttacaggcgtatattagaagtactgtccattttctatgatttcagaaagatggaatctaatattaggaggtcaaaatgagctcacgcacttattacgatatcttaggtgtatccagagatgcgactctggaagaaattacttcagcgaaaaatgcattggctaaggtctaccatccggatgccaatatgcataaagatatagatacaactgcttttatgcaggagattctggaagcctaccgggttctttccaatccggcgaaaagaaaagcttataatctggaaatttttggagttacagaccgtgtttttaagacatttaaacttacgccggaagatgagaaagaatccgtttctttcgtgacttactggaatgcagccgtgcagctccaggatatcattgatcaaagtgttcgtgtaatggaacgtgcttccaagacaaagacactctctcaaaaattaatgaaaaagcttgggaaaaatgatccggatgagatgcaccgtgaacgccagctcagccgcctttccatgcaggcaatgcgtcagattaccacattgaaaatggcaggaattccaagcgaatactggaatatagatgccatgaactgggtactggtccgttggggacaaaaacaggatacggatttccgaaatttgttcaaacgatatgatatctacgtggagaaacactattctgtttctgagaagaaaaaactgcatgcatataaacgtcagtttcatcacaatttgaaaaagcttctctcctatgcattggatgcgtaagaaacagggagaaatatttccggtatatttattagaagaatgaggtacatcatgaaaataagagtagcatttgtatgttgggggaatatttgcagatcaactttaagcgaaagcgtgtttacctataaggtaaaagaaaaagggttgagtgatcagtttgtaatagacagttttgcgacaagcacagaagaaatcggaaatccaccgcatagaggtacagtaaacaaactaaaagaagttggaattcctttagtaccacatcgtgcaaaacagatttcattttccgattatgataatttcgattatatcataggtatggattcgatcaatataaaatatcttaaccgcatgcttaaaggtgatccggatggtaaggtttctaagcttttagattacacatcacgtaaaggcgctgatatcgcagatccctggtatactgggaattttgatgcaacatacagagacgtaaatgaaggttgcgacgctttattagcttatattttagagcaaaaataatcgagggggcagatttgctccctcttatctattccacttttatttaatatctaatccaaatctgtaaatctcactgattctggcctgtgcctgttcagattcttttttcttgataagctcgttacggtcacttaaaatagcaagcatttcatccacaacttctacatccggcaaatcagaataatgggataaatatccgatcattcttgttgctgtataatcggtattcagatttctggtgacaagatcacataaattctctgggtaacctcgttccatcatcagattgtagagctgcatgctgatttctgttcttggtttcatgggtgctctcctttttttgttgtaaccattctatcatgttatgtccaaaaaatcatctatatttacatgtaatatctgcataaaatcccgtgggttattttctaaccgtctatgccttccaacccttggcttaacagttattgagcatctcttaattgctctacaacgctgcattttgctgcattgtcatacatcatgcaggggatcagcaaccccagcagaagaaataccggaattgtcagcaggacaggcagaacggtgaactgatactcaaagaaccagaacatactgcccagcatttttcctgcaagcggtcccactgccagcgacagaataaaggccaccgctacggaggacattgcgtaaaacaatccctcgtagatcagcatggttttgagctgccggttcgtcattcctacagcctgaagcacagcaaattcacggcggcgggaaagaataccggtcatcatggcgttgaagaaatttaagagtcccaccagcccaatgatagcacagaggataccaccgatcagaaggaacatctgccggaactgagcaaattcagagcgagccgtggccttgctttcatacatcaagggcgaaaactcaccggcagtgagcttcgatagatattgctctgcttcggcctcgtcagtttcgtccgctgtgtcgaacaggtagagcatcggaatggtcgcaccaccgctgtccctctgtgcggtgtccacagacaaaactgcatcatagccatcaccaccataacgataacccatggaatacggaagttctaccaaagcgcataccgtgtactctacatctctggctccatacaattttgcctgaaggtactcctccggtgtatcttcggtgcagagttctccggtgcggctgtcgatatatttcacatcatccgcataggtagccgtgatcgtgtctccaacctcggggtagtattcaggattgggcagattgccgtaatcatccaaagaaaccgcaatggcaatggcgctattgtccggcttcaacataggagaaatatctccatcaaacacttgcagcttgtcaaacaggctgttatccaaagcctcgattctgctatctcccatcaccatattcccccggtgctctatgcggctcatatggctgtctaactgctcggcgctttcgtaccttgcatagttctgccgcagagcatcctccgtcatccacaggtatgcggtttttcgcacagcatatcccgtgccggaaagactggcctttgtgtttgctgcgatctcctcgatctgttctggcgtgatgaattcatctgccgggttgaaacggaaatagtcgggagtgctgacgataaaatcggcgcaggtcatggaggatacatacttctccatgctgaagcctcccacaaaggcacacagcgcattgaacagtgtcaccgacagtgccagagacaacaccaccagcaccgtctttttcttgtttcgtcccagattggcaaaggccatctgatggagcttggccccccgggtgctgcgctgttttttcttagtctgcattgcatccgtatatttgatagcctccaccggagagaccttggctgccatttttccaggcttggaacaggacaagagcaccgtcaacagggaaaacagcatggaaccaaggaagatcacaggcgaagtgctgatggtggtgatgcctgcatccaacttggtggagcgcaagacaacaggcatcagaacagcaccgatgccgtagcccagtagcagccccgccggaatgccgatcagacaaagcagaagtgcctgctggcgaatgatgcgtttgagctgccggggcgttgtgccaatggttttcagaagtccgtaaaaccggatatcccctgcaacagagatctgaaaaatgttatagatgataagataccccgtgaaaatcaccagcagcaaaaaagctgctatggcaattatcagctctggatcgagctgcgactccagctgggatgaggtatatccccaattgacgccgatccggacgctgttgggatcagtatagctgtcccaggtgtagccaagatcggtatccacctgctccatctgcccttgaatatttgtgccggaggccagcatgacattcaaatcggtgcggaaaggctgtaaccctgttttcactgcctgcgcttcgatgtcatctgcgtaatcacggctgatgttgatgtagtgaacaggcattagttcatcatagtcccaatagcctaccagcgtaaaggtatctgttacagtaaaggcggtttgatctttgtccgtgatggaatatgaaaccgtgacctcggcgcccagttccggtgtcacaccaagcagctgcaacgctgtcgtatccatagccacctctttgccgctttcgggcatccgtccgatagtaggggttgcatagctccatttagtgcagttggcatccatgtagctgatctctgccggtattttggcaaagaccccctccgcagtgataccgattaccttccgtacccccgtagccttcacctttgggtgagcagcgatgcgttccgcctgctcgggggaaacatccttaaaggtgccgtgtgcatagccgcctacctgccgaaactggtaggtttcatagctggcgttcagtgacaagacaatggtgaacatggaagtaaatagcagcgttgtcagcgcaatggcaaaaatagcgatcagattgcggcgacggttcgcataaagagattttaagctgagctttcgaatacattttctgtttttgacattcatcgtagtcacctcccgttagttctctgagacgatccgaccatcttcgatacggataatgcggtctgccatctgcgcaatttcttcgttgtgagtgatcattacgattgtctgggcgaatttttgacttgtgactttcaaaagactcaatacatcctggctggttttggaatccagattacctgtcggttcatctgccagaatgatagcgggtgctgccgccaaagcacgggcgattgccacacgctgctgctgaccgcctgagagctgatttggcagcgcatccaagcggtcgctcagtccaagcgtctgcacgatctgctgcacaaaattcttgtttacctttccaccatccagttcaatgggtaaaatgatattttcatatacattcagcaccggaacaagattgtagctctgaaatacaaagccgatttttctgcggcggaagatggtcagcgcttcctctttcagggagaaaatatcctgtccgtccaccatgaccgtaccgcttgtagggcgatccagcccgcccagcatgtgcagcaacgtggattttccggagccggacgtgccgacaattgcaacaaattcgcccttcttcacacttaaatcaactccatccaacgcatgaactgcgttattgccggagccataaatctttttcaggtcttttgcctgtaaaacttccataaatgaatacctccatgaaaaaatctgtatgtatgaaaggaaatgatccttttacacatacagattatcgcataggattctttccacattcttgcgagggcgcaaaaaaatctaacagttttgaaagaattgttgttatttcggcagaaatatggaaaacgcacttccttttcccggaacggaagcaaccttaatataaccgccctcgccggatatgatctgtcgggaaaggtataagccgatgccgaccccttcctgctcccgaacggactttgaacgataaaagcgggcaaagatctttgcctgctcagtttccgggatgcctgaaccggtatccgatatatcgatccttgcaaacatttcgtaacttacagcagaaatcctgattgtgccatgctccgtatatttaatggcattgtctacgatattagccaacgcttccgctgtccatttgaagtcgaatacagcaaaagcatcggtatcctgcaattgcaaagacaatcctttttcagaagccttggcggtatattgttctactacgctttcaagcagtggctgtagcgctgcttgctgaggggcaagtgaaatgatcccgttttccagtctggaaagctttacgagagaatcaatcagaaatcacagcttttccgattgtttgtacagcgcctccacatttgccttcgccgatgcaggcagagtttcctccatcaaaagctcgctgtataacagcagatttgcaatcggcgttttcgtctggtgggaaatgtccgcaatcaaggatttgattttgtctttttcctgcgctacatttcgagaagatgcttctgcggcagaaagatagtgtgcaaactttgtttctaaagcagacagccggctttcatcaaaattggtttcagaaaaggagccggtcatggcagcatccagcatcctttcgatttcttccatcgtttttctggcctttctccgctcccataatacaacagctaccgccaccagaaaacacagcagtatgatcacaatgccggttctattcatcttttgtcacccagctataaccgattccatagacggttttaatgtatttctgtgcaccaagcttatccctcagacgcttgatcgtaacagacaaagcattttcatccacatattctgcgccatctgtccagatccggtctacaaggtctccacgtgccatggttcgacctcggttttcaacaagcaggcgcagtaatttttgttctgttttactcaattccacttttaaatctcccgcataaaaggtcatcgcctcaaagtcaaattgaaaaagatcaatacaaatcggcgcatttttatggcttgacgcttgctttcgcagttgggtattcacccttgcccgcaaaaccgaaagagaaaaaggcttggtaatgtaatcatcagcgcctctctccaatccgtctacgatgtccaaatcagtatcattggcagtcagcagaataacaggaatcccgggcatgttttccttgatctcccggagcaactcaagcccactgccatccggcagattgatatccaacaggatcagggatacaccgccgcaaagtagctgctccttcgccgtttttaggtcttgacaggaaatgatctgccgagcatctgccttcagcgctttgcataacccttgattcaaaccgatatcatcttcaacaatcagtaattgctccatatatctcactcccattttttctatatctatcattcgctcctccttattatcagagctatttcagccataatattctttaaatattcttttatctgtccctgtttttcctgaatacgctcaagaattactttttccgcattagtaacagcaaaaagaccaaacaactcagaaagcggctgatgatttatctgtttttccagtttttcatatacctgttcaactttatcatttctcaaagcgcaaatttttcactttgaatcacgtttaatatgcaattctaaaataatccaaatacgccttatacttatcctgtgcggtcagacaggtatctgtcaaataacctttctcattgttccactctttcagtccacggtagtagaacatcttcagattgtcctcgataatgaacggcacgatattatatttcagacattccttaaacataatcaatctgcctacacggccgtttccatcctggaacggatggattctctcaaacttcacatggaagtcgaggatatcttcaaaagtcttttcttcttttccgttgtactctgtaagcagcgctttcattttatctgcaacttcttccggaagtgcagtatccatgccaccgacttcattcggcatctttttataatcgcctacagcaaaccaatcttttctggaattactggtactgctcttcaagatcagatgaagttctttgataaacttctctgtcagagctgcctttgcattatcaataatcatatcaatacaccggaagtgatttgctgtttcaatcacatcgtccacattcagcacatctttttctacaccgatggtgttggtttcaaagatatatctggtctgatcgtgggtcaggcggctgccttcaatatgattggagttatatgttaagtcaatctgtgtcttatggtaaataccaccggaatacatacttgccttctgctcctgtagaatatccagcaatataattggctgctctttctttttattggaacgctccggcttctctgcattctcaggaatgttccaggtcttgccggtaagaaatgcaccgtttacgcgtccatgagcacagtaatttctaacactgcgctcggacacatcccactttttcgctatttcagtaactgaaagatatcgcatctatgatcctccgccataaaatctatccaaaaaactacgttaatctattacatagtatatcacatcatcggcaaaaataccaacacattccaagatcgatttctgctctttttgccgacataggaaatggcgcttccggatatagaaagccggactccatcaagaatttatcagctgtagcaaatcctatgccacggcttccacccgtaatgattgcaactttgtcttttaatctcatttagactacctcctcacttagtttctagctacattataagcaaaaggtagattattttctgtgatatcatcacaaaatatcgcaataaaaaaccctgttgctcacgcaccagggttttggtttatccatccgtatttaacacaagattaggcttctattcaacttctgaaaactgatcttttccaacattacataatggacattcaaaatcttccggaacatcctcccactttgttcctggtgcaataccaccttcaggataaccttcctcttcatcatattcccatccgcaaacgtcacatacatatttcattagtttgttcctccttataaatatattaatacacagcatatattactgttgtatctgaattgttttgtaatcttagcatgaatatcaactgtttttagcatttccagaacccatgaagattgcagtatgcgtatacttcttctacatattctccatcgcaaaggcaaaaatccgctaccggctcctgacctggatttaactgttttctgtatattccctggtttgtatttaatgtaatccactcaatgaaatgttcttcaagcattggatgttttgtctctccgaccacgacatgaacatgactgccttctaccgtatatacaggtacatgcttctcaacagcagcatctgtcactccggcttttaattcctgcataggttctccgcaacaaattacaggtacacccttatcctttaccttttcaacaatgtttccacaatgcttacaaatacagtaccttacttccatgcctttttctccgtccatgtgtaaaatttataattcaattgtctctataatctttttcaatgaatctgcagattccttaagctttaacgcttcttcgccacttaaattaataggtatatcagactcaataccatctgcacctacaatagctggcatacttaacgatactccgtcaatatcatatactccatgaatcatgtgtgatacaggaagtattgatttttcatctctcataatcacttcgcagattctttttacagacattgcaattccataataagtagcgtgctttttgtttatgatctcatacgcactgttcttgactgctgtagctatttctgccgtgttttccttgtgcttgtaatgtccacgcatttcacacatttcacttaatggaacaccagatacattggctgatgaccatgctacaacttcgctgtctccatgctcacctactataaatgcatgaacgctcctactgtccacagataaatgctcaccaagcttatatcttaatctggcactatctaacacagtacccgatccaataaccctgttttctggaagtcctgataactttatggctacctgagtcaggatatctaccggattcgcaactacaagcatgatacctgcaaaatttctctttgctatttcaggaatgattgacttaaatattgctacatttttatttacgagatcaagccttgtctctcccggtttctgtcccgctccggcagatatgacaacaattgcagcatcagccacatcatcataatctccggcatatattttcatcggactcgcaaatggaataccatgactgatatccatcgcttctccttctgccttgttcttatctgcatcgataaggacaatctctgtaaacaagccactctgcatcagagcaaataccgatgcagaaccaacaaagccacagcctatcattactgctttttttgaattaatcactttcttcttcataataatctcatctccttaataattttcttcatgtacttcaaaatagctctgtggatgattacataccgggcatacttcaggcgccttagttcctaccacaatatgtccgcagttacggcattcccataccttaacttcgctcttttcaaatacctgtgcagtttcaatattcttaagaagtgcacgatatctttcctcatggtgcttctcaatctcacctactgccctgaattttgctgcaagctcagggaatccttcttcctcagctgttttagcaaagccttcatacatatctgtccactcataattttcgccttctgccgctgccgccaggttttcctttgtatcaccaattcctgctaattccttgaaccacatctttgcatgttctttctcattatctgcagtctttaaaaacaatgctgacatctgctcgtaaccttccttttttgctacagaagcaaaaaaggtatacttatttcttgcctgtgattcccctgcaaatgcctcctgtaaattcttctctgtctgtgttcctgcatatttgtttgcttccatctcttttacctccgttttctttactactttttcaaaatctgatgccgggtgcttgcacaaaggacatataaagtcatctggtaattcctcgcctacatattcatatccgcaaattctgcaacgccatattgtctgactgtcctctgttttagtaactgtcacagctatccatgctgttcctcctttaccttctccctgcatttcgggcaaacgcctttaaatgaaatatcataatccacaaattcaattccatgagtgttatgaattctttccagcaaatccggtattggatccatatccacatcaaaaacttcaccgcactttatacatcttacatggtaatgatttttcaatgtaaaatcaaatcggttcggtccatccggaacttcaaccttccttaacgaaccctcatctaccaatatatcaagatttctatatacagttccttttccgattgtaggatatgcttcttttataaattcatacacttcatttgctgtaacatgtcttctcatttcgtatacggcatttcttacaagatctttttgaatggtatttctcctacttgtcatttctcctccttattaggattagttcttaataaggattatataccactattatcctgttgtcaataaaaatagtaataattctcattattataaaaactaacaaactgagcatcttttacctgaataactattttatttcgcgttcaaatacatcgtaacacctcctccagaacgaataatcattctgaatttagtatacttgtggatatcttaaatatacagaatcgcaaaaccaagttctaattctatagaactatattcaaagtttttctttgcatttacgtaaaaaaagcgttatgattgaatcagttaaatcacaggaggtatcaaatcatgaaatcacataaatactggtccttaggcgcacttttctgtatgttgggatgcatttattctggaatcaaaaaatctatgactgcacataaatactttgcctattcttcattgctttgtatgggcatgtccatttattctggtcacaaacttgtttctccaaagaagaaaaaaatcactgaatcaaataatagtgagaatagttaaataaaaaattgacctttattcatcaaagacaaaggggctgttgcaaaatagatgagtaatcaatctatggagcaatagctccatttagtaccatataagtgtaagagataaagtataccattagtgctttatcttctgcacttatttttttatgataagggagtaattggtctggcgagcagctttttggattaaccacatccgtcataaaaaccgtcaaccgccccttattataagcggtcgtttaagcaggttgaaacccgcaaggtgctttcgtgtaacaaactaaaatgagtggtaataagtgtggatgggacaattacagattttttaggaggttacagatgataagtgtaggaattgatcattggtatcgactgaaagaatatgaaccggaagaaagtatttacgcagaactaaagcttttaggtcgacagtaccgccattatatatagatttattttgaagaaagaaaaagaaggaaagtcaaaacgtgccgcatctactcctacataacgataatgccatggctcatagcttgtccctgtaatctcctgtttcccttgtgggtaccgtaatatgaaaccataattatgtgcatttgcggcaagccacgtatatacctcatcatttgagctctttgatttatcagcattaatatcaactgcaatgcctaattggtgttcacttgttccgggcaaagctacccattccttagcagttctttctgctcttgactgtgaatatccttcatttatataagcctttatcttatcatctaatattttctgctgttcatcataagttcgataaccttcccgaacaaccggatatattctatctttccttgctgcatcaaacatttcttgtaaatacgtatatatcctgctatccaccttttgaccattcgataactctgttaattccactctataatcttccggtatttcattccaacggtttattacaattgaataccactcctccgaaactggaatactatgtaaattccctaatcgagaaggaaattcgtgaaatagattacatagtatcaaaagcaagtaaactatgataattcctctcaaccattttcctcgcaacttattctttttatctcttttctttgccatattgttatttatgccttcatcctttttgaccagctctttatagcgaatggcatacatagaataccaatcaagacaggaatagtaataagtagatatggtgaccagataagcttccccaaaatacgaaaagtattagttctgaaaatatctgttgaacttcctaccaatggtattaaatccaatgctttttgcattttataaggaagatattctgcaatcatcattggtccatatacaacagccagactaagcagtaaggtaagtacattattttttacagccgctgatataaacataacaattccggcaaaacttattgctccaagcagtacaaaggcatattcataaatttctgcctgcagcatattcataggtgcaacagcaatcagcttgatattctgaatcggcatatcccatccggcagttcccataaaaaacaactgtgatataacatttgaaacagcaagtaatgcaaataactccactgtaaacgctaaaccagtaagaattttggcaagagcgattttcccccaaccatttcgagtcgtcaatactagtgtgcttgtattatcatgccattcgcccgcaaataaagaggataaaacaataccgagaaacaaagccatcacaactcctagatccgcaaccatactaccaagaagcgttgaccagccttctacccactcataatgaaatggtttttctacctttctctctatctgatgtaaaaactctttttcagctcctacctgaccactgacctccaaaaactcatcaagcacctgctgtcttctttcatagaagcctgttaacttatccggatcaacatagcttatcatcgttttataattactggtatctcgaagctccggatacaatgttccgagccaactattaactatctgccagtctgtcttttccagttcttcctccataccgtcagcttccatttgctgataatcacttactatttgctgcaaggtttcatccgtcaattctccaccaaatgaaagtgcatattcctgactatcctttattactgtatatccatcaaaattattgccaaaagcacttgtatagtcacctgaactgccaaaaccgaaccattgaaacgaaagtatgcttccaaaaattacataataaacaaaacacaacaacacacatattttaacaattttctttcgccataactttttatgctctaaccaaaataattccattctatttcactccttcctctgtaggaaaataaaataaataaagatcttccaatgtagcttcacaaggaaccgctcgctcactaggcatattgtctgaaataatacgcaatataatttcttttccttcatgccgtaaattagcaaccgttgtttttgtctgccattgtctagcttcttgtggagaaacagaaagttcccaaaccttaccatttgccttgtgaatcaactctggaaccgtaccctgcaatacaacttttccttttttcatcaatagcacttcatctgctattgcttctatatccgatacaatatgtgtggaaagaattacaattttatcgcctgcatactctgagagcagattacgaaaacggacacgctctttcggatcaagtcctgcagtcggctcatccaaaatcaagattttcggattattaagtaacgcctgtgcaattcctactctttgtttcataccaccagaaaaagtttttacttttttgtttgccacatggcttaaatcaactacctccaacaattcagtcacacgtttttttgcaacattcttcggtattcctttcagtgctgcaatatacattaaaaactccaccgcagtataatttggataatatccaaaatcctgtggtaaataacccaacacattccggtaatctgcccccatcgaagttacttcttttccatccagcaatacctcccctgaggttgactccaaaacagcacatagcatacgcatcaatgttgttttacctgcaccgttagcccccaaaagaccatatactcccggctttaaggtcgcactaacacaatctaccgctattttcctgccatactgttttgttaaacgatcaagcgacaattccatacatttttccttcctttctcatctctgcaatataatgaatttcatttataaagaacatagcaaaaatcaaaaatgtaacaatccacacccccactgctgatgtttcatataaccatggcaatatccttgctgacataccccaacaaatgcaggaacccaacattacaatcgcacatatctgtaaactctgtttcttttgcaagcggatcaaacgtagcaacgcaaccatacacactaagtacggaaccaggcagtataggactatctgtccaatctctttataagaattttgcaaataaacttccatgcacaaaagaattgttatacacactaaattagccgccccagccagaaccagctttgctaacgtgatttgggcaccagaagctcttgttaccgcttcaatctcgctcattccataatactggcttttaaaaattgctggtatgatagccaatacaaacagcggcataaaaattggtatattctttggcacgtctgcaatgctggcaattgttaaacaaactataaataacgttactgcctgcaaaccaaatattggaataccttcaaaacgaaatacatctgaaagatagtgaaagaaacctgtcctcggttctgccctagtcacttcctgttctcgcacaatttcagtgcaaagcttaatcgtttcctctaatcttttaggctgtacttcctctcctaaagattgctgtaaatagcccttcaaatttttatatttcattttcctgctcctttctcataatttttaaagcattacgaaccctgctttgtgctgttcgcatattgcatcccatcacttttgcaatctctccaaaactaagttgttctccaaagcgtagaatgactgcttccctttgttctgatgataaaaaattcaaaaaatagcttatctctgccctatcctctagccgaactatgtcgttatactcatgcactatattttcttcatcttctaatggataaaactcaaccttcctactttcatcaatacataaatgatttgcaatcgtgtatagataagccttaaatttctttttccctttatatccggataaattcttaaacaacttcaaaaatgtttcctgagtcaggtcttctgctttttccagattagagcaatgccacctgcagtaacgtaaaatagatgtataatagcgttttatcaattcttctgctgcattttcatttccaagtagaatctgttccactaattcgtcatcactcaacacgcatcagactcctttccattgaatatctgtatatatataataacgagttatgcacttaaaatgattaaaagattcctcattttttcttaaaacgaatgaaacgattaaaccaatattttatctcaacccctttcagaaatatcaaataaatcaaacactacctttttctccgcttagagtaatacttcccacaccacacaatcctgcaccggaagcactgcctgtgtcatgacacaggcgaaatcccccacactttcctatcgtctgtgtggtcgaatttccatagggaagtatctctaaccctctctcgatttttcttcggttattcttcattttaccgtcgaaatgcattgacctttcctaccttctttgctacaatttgctgtgggtgattgtgcccaaaactgaataaaacctgaaacgaactgttgtaaaaatcgaacattttacagcagtttttttgtacccaaaatcagaaaggaagtggcagaaatgacaaatcgaaaccgcgccaatccggtgcaattttatctcagcgatgatgagcagtacatcctcaacaccgaattcaaagcatccggcatgaagagtatgtctgcgttcctgcgcaagctgatcttatatggatatgtgtatgatgttgattacagttacctgcgaaattataatacggagttgggacgtatcaactccaatttaaaccagatcgcaaagagggtaaacagcaccggaaacatttatcaagaggatataaacgaagtaaaggagttgatgaataaagtatggcgtacacaaaaatccatgctatcaaagcaaccgttgataaagcgatagactacatctgcaaccccgaaaagaccgatgaaaaaatgtttgtttcctcttatgcctgttctccagaaatcgcagcttatgacttcaaatataccctcgaccactgccgggaaaacagtcctaacaaagcctatcatctgatacaagcttttgctccgggagaggttggttttgaagaagcgcaccgcattggaaaggagcttgcagataaacttttagagggaaaatattcgtatattgttaccactcatattgataaaggacacgtccataatcacatcattttttgcgtcgctgataacatcgaacataacaaatatcacgactgcaaacagtcctattaccacatccggaaactgagtgatgaactgtgcaaggaacacaatctttccgtcatcattccgggtgcgcagcgtggcagaaaatacaaagaatggcattccgagcagaacggttctgcatggaaaacgcagatcagaaagaacatcaatttctgcatcaagtcggcttccacttacgaagaatttctgcttctgatgagagccaaaggttatgaaatcaaaggggaaacttttgaagaaggagctgccaaatacatctcattccgccctctggataaagagcgttttgtgcgtggcagtgcgaagtctttaggaaaggaatgcacaaaggaacggatcagggaacgcattgaaagaaaacgggaacgaaaggcaattatccccaaaaaagactactctgcccgcagacttattgacacctctgacgagaaatttcagaacagtccgggactacaaaggtgggctgccatcgagaatttaaagattgccgcacagagctataatgaagtcggcttccttgcagaactggaacaccgcatcaaagaccttgcggaaatcatcaaatacgcacatcagtacaaagtaaacgctcaataggttctttccattgttagttgaattcaaagtattaaattgatatgatatgtatataggtggaggtagcaaacaaatgaaagattttattactgcattagatccgaattatcaacttgacaaatatcatatcaaaaataatattgctgtattttatattagctccaagatgagtgaagtaaaatgtccttattgtggtactctttcatcaaaggtacattcatcttatgaaagagaaattcaagatcttcctatgcaaaatagaaaggtaatacttcttgtgaaaactagaaaaatgttttgttctaattgcaaatgtgaaaagaaaacattttctgagtgtcatccatttgtagaaaataatggaaagaaaaccagaagacttgttcagaatatattatttacatcagcacagcttagttctgtgaatgcagcaaagattctaaaatcaaacagtatagaagttggaaaaagcagtatctgttctttgcttaaaaaaaatgccatcaattgtggataagtcttctgtaaaaaaagtttgtgttgatgacttcgcgttgcgcaaacggttttcgtatggaacagtgatggttgatttggaaagtcataagataatcgatttgattccaactcgaaatactaatgaagtaaaagagtggttgtcaaaatatcctaatattgaagttatttctagagatggtgcacagttgtatgcaaatgcagcagaaagatcgcatcctggtataacccaagtaagtgacagattccatataataaagggactgactgaggctataacaaagtatatgataagaacatttcctgcatgtatagaaattccagcagtaagcgctgaagctgatgaaattttaaaattacataacataaataatcgcaaagaacgtgttagttttgctcaccaaaaacgttcggaaaatatgacagtcaatgaaatcgcattattattgcactcctccgtaaaaacagttcaaaaatatttgatgctcgatcctgatgaatttgaaaataggacaattgtaaaggaaaagaaacatctattagctatgaaacagaaacaaaatgaagttaatgagacaagagcattagctaaaaaaggtgtgcctatagaagaaatagccaagactatgcatcatacctgtaaaacgatacaaagatatttatctccaaattattctgttgaagatggacattataatgctcgtattccaggaaagcttgcaccatatgaagctgaagtaattaagttaagaagcgaaggaatgacttatcccaatattcataaaattattaccgaaaaaggttataaaggttcagttgcatccttaaggatgttcattcaaaaagaacgtattcgaaatgaagcacatttaagtcaacaagagacctgctcggattatcaatcgaaagaatacattcagagaagatctttgatacaattaatctataagggattaagtgatgtcaagacaattaccaaaacgcaatatgagcaagttcttaaaacgtacccagtgattactgaaattatatgctgcaataaaagaattctatgaaatactatattcaaggcgcgacgaaagattagaaacatggcttgaaaaaatagaaaattttaacatacctgagctacagacctatgttaacggtataagaattgatattaatgcggtaaaaaacgggataaaattaaagtataataatggacttgccgaaggaagtgtcaacaaaattaaagtaattaagagaattatgtacggacgaaatagttttgatttattaaaagcaaaagtgcttttacacgagcaatttcgctgtgaattcaactaacaatggaaagaacctatttaccgtttatgttctaaaaccaattccaacttactttcagtcatatcctcggatgcatgaaacactccattcttatccaaaacgttgcttccaatcagataatcaaactttggtgttctggtatactttaccggcattccaagtaattcacctatggcataagacagcttctttcgttcctcacctttaactttaaaatcaatttctgtaatcattgtacataccacctttctttttggtatgtacatatatcactctaccgggcaaattagtcaacacaatatttgaaaaagagctgccctatttcaaggcagccctacttctacacaaatcggcaatatttttcgcgcacagcatttcaatatttttccttaatctcagccatttaagctacaaagaccaagttcccacaataccccctgcgcaatttcgcgaaaatatgcgtgagagggggcatcggtctttccctcaaaaaaatgtagaaatatatattgcccctacatcaatattccaatgtgagatttagaagatctactgcctttttctcacttgtttctattgctagttctacagacttcttagctttttcgagcaaagctttactctctgcacgaagcctaaaactctcttttataacctctgttatttttctctgaatcttatcatcagcaataggaatcaatactttctcaatttcctctggacgccagtgttgtattattgaaccacctgcatctctctctgcttgcatacctacaacacgcgaattaagcacaagtgtcaaataatccgccaatactgatttatctttcaaaataaaatgcaatagagctcctgaagaaatagccttcatatcttcttctatcttatatgcaattccaatacttccatcttttgaaaataaaatcatatcctttttaaaagacaactcttcattgtaatattttttttcatccaagaaaatatcaggttctttcaatccttcttttgatacatcagcaacgcgataaaaaggaacaccttctgataaatatgcatcactacctggttcaatagattttactatgttcacaagagaatttagtggtctacacccatatttattcaatcgttctaccaattcatcaaattgtggcataaaatactctgaatcaaatcttttaaccttttgtatatcacaaaatgaccgaatagacacattatgtttacatggctcccatttatcaatccccaactctttcattaggattttttctgcttccttgtattttgcatccgactcttttttcttttgcacagatgcttcatacaaattttctacctctttctgaaacttcttagaatactctggaatacgcattttcgttattattggtaatgtaatatgtggctgtccagtttgtgaagcagatctccacataagattctgaccatagcttgaatgtaaaaaagaccacaagtaatatctgttaatgccttcaagaatatttgttcgtagaataataacatccctacacgtagcgtacattggatactcatctgtaaccagtccgacctttgccaatgtatttccacctttagcaataataatatcccctggatatgccaccgaaatagtagtaggattatcatccaaaactttttgaggcaaaaaaacagtcttatctgtgagcacaaccaatccattacttatctcattcacacgtaaaaaaggcactaaactcctatcatcactataaaaacccgtgatagatggataaaatgcactgcaatctacaatacccttatgttcaccaactgtttttcctttcttcttagcaataattttttctaatttaatattgctttttgagtagtattctgaatcaaatcttattgttccagtatctaccctcgacaattggacaacagaacattccagcctctccaacaaattgttgaatgcatcatcactggagaggcttgttaaaaagggaattcattctccggatgcattatttgattcaactcctcttctgtgggtgcaaagctaagtttattatcatacgcaaatttgataaaggcttcagcaattccattctgactatagatattattaggattaacatttttcaatttaggatcatgattaaacaaatcgtgtttaacaaaaatatgatcatgcgtatcttttactctctcatcatattcaactacatcttcttcttttagatagaacttctgttcctcattcgaaagatttaaatattcttcatttgaaatgatatcattattgttatcacctaacacttcctcttctttatatagcgctcttacgtccggagctaatgacaaccattcaactatgctaagttctttaggattttctaaatcgcaattatctctcaggacaaaaatagaatttttcaaaatccattttttatggctttctaaatctccaaatttttcaataaataaatccttaatgaatttagttttgcctgcttccgttttatgttcttctggaatagttacagtctcaatttttatcgaataatttgacttttttgtaatttccttatattcatcttcggatataattacactatcactttttcgcttatattcataaattgtttttttcttatactcctttttgtttgcaagatactcttcttctgtaactaattcttcattactctttcttatatataagatatttttttcaactttatcatagttctccttatttgcaatctgattatattcttcttctgaaataatcgatttatctgattttcttataatcaattttacagtcgtatatttatacgatgtccagtttacatatgtctctgtaacatatattttatctcctgaattatctttactaggttcctgcattgttgcaaagaaaataggataatcaatgtttccattttcatctgcatcaggttttggacatatattagggtatccacaatcctcatcagtccatttttgaacaaatagtacactggtcttcgtaccagtccctgattttccatttttaaatgtatttctatgcaatccaactactgctaataatctacattgctttaatatatactctctaatatatttatccgatgtattattgaatcttccttgtggcaaaacaatggccattcttccaccaggttttaaaaaattcaaatttctctcgatgaataaaatatctctcccaaccgcattttgtagtttttctttaggatcaccacctttatgacctaaatcatagggatcaatttgttcaacattatccaaatcacctgcaaatggtggattagccattaaaacatcaaatagaaagccttgatatttttctttgggctctgtagctcttttattcttacttaaatctacaagtttatgaaatccttcaccatatttcgctgcccataatggattattcgcaaactctgaatcccagcttttataatctagtgaattaaggtataaaacatttgtatgcccatcaccagcaataatgttaagcattcttccaacacgaacacaattttctccaaaatcaattccaaaaacattttcctgaacatactctttctcttcagcagttctttcatttgtagtaaacaaattagctgcatcgggattcatctgtttccaaacatgaaaaatagtgtgcatcgggaatccacagcttcctgctgcagtatcgatcatcttttcattttcttttggattcaacattttaacacacatatcaataacatatcgaggggtaaagtattggcccatatcactcttttgattattatttaccaaatgttcaaacgcatcatcaaccacttccaaatttgaattaaaaagttttacattttgcaattctttcacacatgatttcaatgcccccttctgcatctctatacgtgaatcatcaggaaatactcccctccatttcttttgtgctttttgaaatagttcatttattttattataaacattatctaatgaatcctgctctttaactcggaactctaataccctgaattttgaatcatcaatctcgtttaatgtcttattatattcattctgaccaatagctataacatcagcatccctactagacattttttcatcatacaattttgaaaaaataagcttgaatatttcctcaaaagctttttcgcttgaatcatttgctccaaatttttgttcaacagaaagaataatgtcctttaatgtttcagttttgagtctatctgattgcattaattgttttaatgtaaatcttcttttgtctttccattcttgaatatcttcacctttttgtggaaaacgatcaattattaactgattctcataatatggaaaatcataaaactccggtgttgatacaccatttaccaaaacccctagctgtgatttcttctgactacaataggaatacatctgctgatacggcgttgatccctcaccatcccaatttttatgataattagtaatacgtggacgttttacctcaattatcatttgaattttcttatgttcagagtcaaaaacagcaatatcaattcttttatcagtatctattgttttgcccgcaataagaactggttcttctaaagaaagctgttctttatcataaccgtattcagtaatcaacttatacgcataatactgcctcactatttcttctggtgttagcttaaaataatcgccatcgttattttttcctcttacaacgcattctatgcctggttctccatttcttcgagtattaattctaccattaatccactctatgtcatccgaagtaaattgattcaacgaatcatattcacttggttccaatatatcttttatctccatgtatactagtcctccttaagtgtattttctctttcattcctttttataactctatctgattcttttaaagccgtccttcttacaaattcactatacgaagcatatgcttcaattcttgcagcctgtttcaacttatccaattcttcttcactaactcttatactcatagaaattgttttattcattttaaagccctcctatgtgcaaaattatatcatctgtgtgcaacatttacaatacaaatcaccacgttgcaacataaaattagcaggtccttttgcacctgctacttccacatttattcataggacaactgcacatttcatctcattaatttgctattctcgtccgtataaaaaccgtagttcctaatctatcgctccaccacaatttgccccgttctatcgtacttcatcgccatttataactgtatccaaagtcctgccgtggcagataaatagtacttttcaaatagtacttttatcattattttgtttctccttgatttgtcccggaatgccctgttttgcaagggtttctagggatttgtaaaatgtgtatttttgctgaactcctggcaaaatagagcaagatggagcaagttattgcgggctgttagtagtaaagttggtagtaaaatggagttggcttactactaaggattatatattataatctgcatatactgaaagcatactctcaacactcttcacaaagttcttagaattatcatcaaactcgtactctccaagtatggtatgatacacttttcccgtatattctgtaacaaaaattgcatcgtataactgttggattttttgttcaacagtaactacactcttaccttcttccacttcaaaggcttcatttctattcagcaatcgtgtagccaaccattctcccttatcagaatctttataaatatccataagtggtttcgaactttttccgcatacaaattggttatataacgatatattaacaatttttagtcctacaagaattggaaccacatacatcaataaaagttgtcttccttttccatctgaaaaagaaaaatcaaattttctactctcgtgtgtaggctcatatattgctgttttcacttgtcgataaaaacgagtggcttcacgcaactccatattatatgtatctattacttttcgacatattttttctaagacataactagattccaaccccatttccctataaaatgcagttttatctgctggtggcaaagatattctcatatcaaaaaatctgtctaaatatctgcacgcatcaaatgtattaccataataatgctttattgtatgttgtagctcacctaaattaacagaaaaaacaaacgtaattctgtcatcatataaataatgttttattctttctaataattgaacagcatagcttggcttacatctatccaattcatctatgaaaaccactaaccgatttcctctttcaactaacaactccgtaaagaaatttttaatattctcgtgtaaatctttttcttctttaatctttgtaagcggattatcgctttttaatttttcaataataccgtttatatttctaccagtaagtgcctctaacacagaacccgccaacttgaatgcattgctattatcatcaaaagcataatttattcctaactgctttattatttcgtacaccaaagaaaataccgggtctgtatcattatcattttcccatgcgtcataataaactgccacatcataattctctggcatgtcttctgcttttttcggaaatggaagtgcgtatacaatacttgctttcttttcatcatccatatcgctcatcggattttttgcatttattagcaacatagattgtttcacaaaaaaagtctttccactcccccatctgccatcaatagcaatagaagaatctccttcttgtgctaatatcaaatcataaaaacgcactaaatctttgtttcgtttcaataaatctttgtccaatgtatgtatcaaattttcttctgtaggaattaattcaaaactattcatgcccatttccctcctgtaaaatatcttgcaactgtttatttcgattaataattacatccacaatatattctagaaacttaacatactgttctggttgcaactttaataacttttcaacagtatcatatttatcgttttctaaaattttctctatgaatacatttctataaatactaccataaactaatttcgtaaatttagcatgccgtttataatacacattgggtatatcatagcaatgtgccattcctctatttacattcgcccctggccatgttggaattatgttccctatatcatagtagtgttctaaaaatccttttatttccggtaaatcgtttacgtcactaaattgtggataattctcacttaaaaacttatcggaataaaggcgctgtctcgtagcccccttttcatctttcaccataatatccgtcttcacattatctacaaataattgtcgataataaataaaaaccccaatagcatatactcctctaaaggagaataatacatccggacattcccaattcagttttatgattttatcatcattatatttttcaacagtttctctcttataaaaaaattcttctacagattgtaatttcatctttagcacttcctctttaaaagatagcatttatattatactacttcttttgataatccgccacaaattcaatttcggcaacattgtaaaaaacgccccagcctaagccagagcgttgcctatcttccatattaaactaccttaaacatcttctgcgacatcggtttctctttcttctgctcaacctccacctgcgctttcctaaactcttccatccgctttaattcttcctcagcatcatcgaatccgatatgcgtgtacacattcattgtgaccgatatatctgaatgccccatgaggtactgtaatgtcttgggattcattcccgattttgccatatttgaacaatacgtgtgtcggcatacatgtggagtaatggttgtctgccttagacagcttattgaagtgcgctaatctatggctttcctctactttctttcacactttctctccttccgacaaggtggtcacacagctgactggaattattccagaccctcaaaccaaaccctcaaaaactgacatgtccacgatatttaccagcaaatccaaatccgtattgacctgcttctccagtttccaagtatagacaaaatgtggttttccatcaatatggtacttatactgatattttccatctgcccttacgcgctctcccggtctgaggactcttcttttggaatctcaaaatatccttttctgctaaacttggtcttgccataaaatcacattcctttctaccaaaagtggctgttttcaagggttttcggggtcatcctatgttcgctcttatgccctgtttcaagcggactctaacattactattagttttaataattagaattattttatcaatttataaattttttccaagttcatatgccttcttcattatatccacatgatcctcagctgtatttgctgcatcaattccacttccaccgaccatgccttttaaggaagccttttcaaagaaagaagttccacaccatgccccacttcagtcggtcattttttgcggacagttcatacatgctatccttttctgttctctgctcctgcgtttgctctcgtttgatttctccctccgtatcttcttggcacaagcaggacaataccttgatgcaccagagcccgggacatattcaacgccgcacaccgtacaatttttagcgggcattgctgcccaccgttttgtaggtatgatatgtaattcatcgacaaagccgatgaatttatagtaaatcttgatttcctgcttcactgttccgtctgccatcttctcacgctccgaaacaagtatcttgtctatgagtgcgtttataactgttgcatccagttcttttaagccttgataatttcggataagggcgaggaagtcacggattccccgtgatttctcgtagctttcattaagagtttccgtcacctctttcagccttgcttcaatttcaagctgctctttctggtatttccccgacatcatctcaaaattccgctcggtaatacgctccatgaccttatcctcgtagagagaggaaaacagcctgtccagttccgcaaggcgtttgttcagcttcttacgttctttctctaatgctttcgccctgctctggtctgtttccgtgagccgcttttctatgtccctgaccgccttttcatcattcactgccatatccgcaaaacagttgatgtcggcaagaacggcattgaataaatcccttgcttctatattgtgggcactacactcgcttcttccgtttcttgcataattattacatgaatactgtacacagtcgataatctctgggcgtttcctcctgtgtacgttcattgcccgcagagcacatccgcagtccacacacttgataacgcctgcaaaaatatttacaaatcctcccttgttctgtggaagcctacgacttgtaataagctgttggacaatatcaaattcctcctgcgtgactattccctcatgggtattgggtatcacttcccattcttcgggcagcttagaggggcgtttcttgcttttcatattggcggcaatccgtttgtagcctacaagatttcccgcatatatcgggcttcttaaaatgctcctcacgctgttcccactccaaatatagcgtttgtcctcgttcccctcaaaatgacgttcaaagcctgtttcgccacgctccgccgcataagcggcagggcgtaggatatgctgtttattaagatgtctgcaaattttggcaactccattcccttttaatgcaaggtcgaatatctcttttacaacatgtgccactttatcatctatcagcagatggttgtggtcggcagggtctttgatatagccataaggggcggtagttcccatgaatttcccctgttgaaacctcgcccgatatgccgattttatcttaacagatatgtcagcggcatacatttcgtttaaaatgttgcggaaaggcgtgatgtccatagcagatttattcaaggtatctacgccgtcattgaccgctatatacctcacgttatgctctgggaagaaaacttccagatataacccacaatcaagatagtttctccccagacgggataaatctttcgtaatcacgcagtttatcagaccgctttcaatgtcttttatcatattctggaaacttggtctttggaaatttgtaccagaataaccatcgtccacatacgtttttgctatgtgccatccctgctttttcacataatccgtgaggatggatttctgtgtcgcaatgctcgcactctcgttatccgtaccatcgtctttagataagcggcaataaatgccgactaaatagattttcttttcttctttgattcctgccatactgtaaaacctccgtatctgtcctatctgttttcatgtcccattgcgtacattctaagcggacagcccctcattgtcgaaggtgtcgccctcggcaatcttcttccgaatatcctcggagataatcgggacaaacgcttctgtaacggtctgtgtgccgacatattcacggctgattatcatctgcactggtgcttttggcacgatacgctttctctttttatctgctttcttatcctcgcccatacttaaatcttcctttccagacagggcagggaagagtttggaaatgtccccgccctgccaatcagataccattaatcctcgctgtttaattctttctgtaatgctttaaggagtgccgccgcttcatcagcgttcagcgtgattcccttgccgcacttttcacggttcggggaaaagctgcggatgtcatacttcggctctttcccattccatgaaatgagattgatttcctttgtgtagccactgtcgcccgtagacaatactgcgatttcctttacgatttcatactggatttctctcattctccatacctcaactctctgtatttacttcccgaaaaaagaagattagcggctgtcacggttgcgtttcctctgcaactcacgctccaaaagtttgatgatggtttcctccatctgcttcggcgttgtgttcttcggaaagtattttttcagcttgcttgtgttgattttcaaggtttctttctggttgcccttttcctccgtcataatcgcaaatatcgtatccatgtcaagccgcccgctctggcttaactgtttcatccgctgtgcctgtgagagtgagggcgttgcttcttcgctctccatcgtggcaaagaggttttcctgctcgtctttcttcaagaaggacagttccaccgcaggcgtgagggcgattttcccctcgtccaccatctgcaaaatcggcggtatcagttccgtcaggcggataaaacgctgcacggtcatcctgcccacgccgaagccctgtgccaccttgtcgtccgtccgcaacttcgtcacaacttgtgacgaggttaagtctgtgcggaaaccctgccgcttcatggcttcggatttcatcttgtaagcaaacgcccgctccgatggcaggatattctcacgctgcaaattgctgtctacaagggtgatgatggctcggtcacggtctaagggcaggacaaacgcaggcacggtatttatccctgcaagttcagaagcacggacacgccgctgtcctgcaatcacttcataaccgtccccgtcctctttcgggcgtgtgattatcggcgtgacaatgccaaattccttgatgctttccgctaactctgacagtgtttcatcttctgccacatgaaacggattgtcggggaacgggtacaagtctttggtctttaacaccttaaaatcctgtttcttcattcacatatctacctttctttcgctctgcttctatgatttttctgcaattcttccaacacttcgggcggtatttttgacagcagccgccccatctgctcgttggttctctgcaattcaaatatcttctgattcgctttctgcacctttagttcctgctcgtacttttcatcacgcatacgccccgcatagtctgattcctgcccaattctctctttcaaactgtcgatatacgcctgctgtttcccgatttccttagagaatttctccacgtctggcagccatgcagagagtaaatctaacgctttatcccttttcttccctgcgttaaaggcgttgatgtcggatagggcagacacgatttcttcatactgtttatcaagcctgccgcctaatttatagagccatgtggggacgtgtttccgcttggtttccattgaggactgcccccgttcaagctgattccaccgtgaggacatccgctcatggtaggcggtctgccactcggataatgatttctggttgcctaagatagctttcgctgacagcttattgtctggcgtaatcggcacaaagcagaggtgcatatggggcgttctctcgtccatatggacgacagcggagaggatattctgctttccaacacgctccgaaatgaagtcaagagccgtctggaaatacgctttttgttcttcgggcggtaactggttcataaattctggtgaagctgtgatgagcgtttccaccatcatcacgctgtctttccttgtcctgcaccccgcttcggctaccatgcggttaatctctttcttgtaggtgtactttggtggtgctatgagatggtaattgtttttagagcgttccatatctatatctgggttgcttttgtaggcttctttcttccgctcgttgtggcgttcacaagccgcaacgccgcccgcttttcgtttctggaaacgcaggattgcataaggcataggcggattcctcctttctttcggcgggtgaccgtcctttggggtgacagcggtgacggtggtgacagcagttttgggataccccctgccgactgccgcaactgtcaccctcaccccctgcatgacggtcatgtcgatgatgacggtgtttttgggatacccccctcgcaagagccgtcaccgtcatgccgccattcttttatccgaagccgtaaggcgtaggatagcagggcacagccctgccttaagggagtccagagggaacgtctggcacacgactttgcagggcaaagtgtagtgtgttacaccctgtaaacgcagtcggaaaaatcggaatgatttttctgaccgcaggggtggttttacacgaccgaaaagggcgagtaaatctcacgcctgcattttgcgtttacggggtgttctcccgtagggatgacagcggcagggtatcctaaaatcactgtcaccaccgtcactgctgtcacccgcagggcagagccgccagctttacatggctttaagcgtcaatgacagtaacaggggggtatcctaatatcgctgtcaccaccatcaccgctgtcacccgccctccttgcaagggcaatccgcctgccgtctttcctgcggctgtactggtagcagatacggttctcgcttaaaaatgtggtgcggtattcattcagccatttcgtaatcaccgtgggtatggtttccgtttcccccatagcggctaacagttccgttgccgtgcctatccattcttccttatccctcataaaatccaccaaccgaaaaaggacatctggtatcgtttctttcgcaagctgctcctgcgttttccgctccacaagctcccaacggcaatcacggaaacgcagcgtgtattcctgataaggcgtgtccctgcccgtcacatacagcttggcggtgtcagacgcacgtttctccttttccagaacaaaggtagcgtccgcactccccgttaatcctgtcgtcccagacaccttgttgaacacgtcgctgtcattctgctttcggatgtggtgtacgacaatgaccgccagagagtgcctgtcggcaaagtctttgatgagggagatgtccccatagtcgcttgcataggcattgtcttttgaagctgtacggactttctgcaaggtatcaatgacaatgagcctgctgtctgggtaatctttcagataatcttcaagctgcacgataagaccgtctgacagcttgcagcttgccacggcaaagtggagccgcccgcttgcttcgtccgtcaaacgaaataacctgtcctgtatgcggcagaacgtgtcctcaaggcagaggtaaagcacatcgccctccattgtcggcatatcccataaagggattccctgcgacacgcataagcatagcttcagcatgagccagcttttgcctatcttctgtgagccgcagaacagcgataagcctgtcgggataaggctgtccaccacaaaggatggtttctcaagcggttcataaaggagcgtttcggcgttgactgtctgtaacttctgcatggctttcctcctttcgggcggtgtctttgttttcgttgcacataggcgttgacctccttaaaaatagatttactcccacggaaaaaagtgagagtatgtaatgccgccaatcccacacaaataaaaaacagatttctttttcgggcggtgtcggtcacggttggagatatttcttcaatttccgcctttactttctcctttgcaatcgcaacagatttctgtattgccgaagcggtgcaatgctccatagcggcgatttggtaaaaattgaactcatactcgtagtagagcaggaaacgccgcctttgtatctctggaaggctcccaaccgccttatagagcgtttcattccgttcttcctcaaccatgcgttcatcaaggctcttaggcacacgcaacgcccgtctgtaaagggtttcgtcccatacctcgttaaactccctgtgccgctcgtcccattagaaaagattcctgttcctgcgctccatctgccgaaactccataaagaactgttccgacacttccaactcgtgggatttgccctgcccgtccttaaagctgataaaataccttgtgccgctttccgtggattcctcccgaagcgtgtatgccttaaccctgtatgccatcctgttgtcctcctgcaaaaaatgagtgaggggatttccatccctcacccagtagcccgcaggatggcaggctgttttagaagctataaaattttccgcagcttcttccgcagatggtctaacctcgcatagatggcaccagtcgtcaaatgcacaagcggggcaatctcctttgtggaatacccctgcattttcagcaggacgattttcaaggtacgcccgtccaccgtgactaatacttgatagagattttcgctctcaatctcttccagtaactccgcaaccgtacccacttccgcctgccgctccctgcctgccatgtcctcaagatattccgcaacgtcattcgtccatcggtaaaaccgcctgttggaattgaagtctgccctgtccgccatgcgtatctgctcaatggtcgcttcatcaacgccgcactcacgcagcagcttttcctccgcttctttccagatacgccatttcctgtcctcccgtccgtggttgtatgccattcttacttcctccaatcagaattgattgagagggcagagaaaagccccctcatcttcccaaaggaaaaaacaagggggctgaacgccttaaattttaattttctattatctttcttagttttattaggattctggctttgcgtttgtttacaacgctctgggttatgcccaacctcgccccgacttcacgctcggaaagtccgtcaaaaaagattgcctgtatcagctcctgttcactatccgacagcaaaggcagggcggctttcagcctgtccaccatgaccgcattgacaacggtttctgcaatgtccaccgcttcatcagtgataaagtccagaggattcccctcgctgtccgtaaatccgtcgagagatagcagtctattctttgtatctaatttttgcagataacgccaccgttccttgtcacggtagaagtctgtgtattgctccctcacgacttcaagcagacagccttgaatggggataaacagcttgtccatataggtctggtcggattccctgcaacggcagaactccgtgtaggataattccacatagccgccactttctctgatatatacctttcttggtgcatatttcaccataaatacctcccatctgaatttttgaaatgtaaaaaatccagatggagaggcggagaacgacaccgcatatcagaaacagccctacggcactttccaacaaaaatcgacaaaagaaaaaccgcaaaggctctgtgacctttacggttataggaaatagtaattctattgtatggagattgtacttctactttcaaggtgagaagtaccgttgcactggcagaaatttttttaactggtttcctgccgttctctgatatgctatgtattgataaattttgcttcgtatgagcagatagataactgcccgaaaaaaggacataaaaaaatccctccaaatttaaaaacaaattcagagggtaatttagggtataacaaaataacccacccgaatatcgttttttttatttggtgagtttgttctttcaaatacgaaacaaaaagagccgatgattcgtgaattgttccacaatttcatcggctctgcgtcttaagcgtctggctctttgatgacagttatcttcaagttgtcaactttaatcaatctttcttgtctgcattttggacaataaaggggataattctccaaaacagtgtccttcctaattttattacgggttttgctcccacaaacaggacacaatatccattcgcatttcatcataattagtctctaatcctttcaaatctcattttatatgacttttgcaagctgttaagctaacttgtggaacatatgccgaaccttatctatacggctattcgggcggcggggttggcaaataaatttaccaatagctggctggtatccttttaactctgtcaagcagactccctgcccatttgtgaaataagttaaatcgttcctgtattcttgaatacatctagcagggatttctcctttcagaatgacctcgtcattctttatctgagtacttacaatatctgcacaataccttggagcatcatgatacgcccgtgagagatattcctgcggtgcataaatttcaaagtggagatatggctctaatagttctgtccctgctttttttaaagcctgctccaatacgataggggaaagcagccgaaagtctgcgggggtacttacaggactataatacaatccatattcaaaacagattttacagtctgtcactttccatccatacagcccctgctcgcagccataaagaaccccctccataaccgcattttggaacgattgatttaaatatccaagtgaaactctgctttcatactgcactccgcttccaatagggagcggctctatggacaacccgacagaagcccagaaaggatttggcgggacttctatgtggatggtatattctgcttttctaagcggtctttccatatatataacagtaggctcttttatttctgcctccacatgatatttttcctcaaggatggcacaaatgacttccatctgcacattccccaaaaaagataacataatctcatgtgtaacagtatcaatgtcaaaatgcaaaagagggtctgtatcagcaatctctgcgagggcatttaacagggcttccctttgctccggcttttgcggctctaccgttgtccgaagtaatggcatgggattatcaatccatgttttgtgaggcaggagtttttcatttcccagaatgtcgttcagtttcaaagtatcatcagctaaaataacaatttctcccggacaggcatggtcagccgggacgatttcaccgtttgtcggaacacacatctctgtgatttttattttctctttttcagatattctaataacatccctcaaatgcaatgttccgctatatatacgcacataaacaaaacgccgccttttctctgaatattcaatcttaaaaacctgcccgcatagttcagattgaccttcaggcgttgatgaataaaatttactggcaattacttctataagctgccgaatccccagattgtttttagcgcttccgtgataaacgggaaataacgttccgttttggaatctcctgttttcttcctgttccagttctgacattttaaacggtttccctgacatatatttctctaatagttcatcgtttcccataattaccgcatcccactgttccatatcgtcattgtccgttacatttatatggggatgctgcccaaccttttgcttcactataatttccgaagaaagctttgctttcatttcccgatataccattggcaaatcaatcccctcttggtcaattttattgatgaaaaaaattgtcggaatcttcattatctgtagtgcatgaaacagtatacgggtctgtgcctgtatgccatcctttgcagaaactaataatactgctccgtctaatacggataaagaacggtatacttccgccaaaaaatccatatggcctggcgtatctataatgttgacttttacatcctcccactgaaaagatgtcactgctgtctggatagtgattcccctttgacgctccaaattcattgtatctgtccttgttgtgccttcatctacgctccctagttctgcaattgcaccactggtatacaataaactttccgttaatgttgtctttcctgcgtcaacgtgagccagaatgcctaagttaattattttcatgtgattttcctcctatcaacacccaaaaaagggcataaaaatacccagtgataaatactcctatcactgggtaaataactccaatagccccaaaacacttatatgttttcgggcatataaaattacatgataaaagtattcttaaactgggtacaaaaaactaagccccatattaaaataaaagtgaaacgggactgctactttttgttcccactatcaaattgacagtttatttaagaataccttgccgcatatttattaactccttgtataatactgaatctaattatattccttaaccctttatttgtcaagctgacaaactaaagcagaaaaagcggcaggatttccccctgccactaatcatctgtttatgcaaaaataatttccttttccacaatctccctcgcacaagcccttatgttattgaggcatcctgtccattctaaggcgttttctgcctttagctgttccgttatgccctgtgcctgtttcataccctctatgagcctttcaaagcgttcctgtgcctgtctgttgatgtcggcaaggtaggcgtttagcctgccgcttgtaagaagattggtgtatgtaactttacggtactgttttagataatctaaatgccgttgcccccagatgcctattgcctgttcttcttcggcgggtacagttaagcacggtatcaaataatccccttgcctttcgtatttgccgcccagttcctcaaataatgattttgccattgtctgttacctccacattcttttttattttgaatgtccgcaaaatccgtcctacatcttttgctccctttgcacactcatttgcaagtatatcagaattgctccctcctcgaagacttgtcgatataatcaatactttttttaccataattaaccaactccgttttcttcaaaaaatttctggattttatcaaatgggattacatccaggttatcgtaaagatctgtatgaacagcccctggaattgttagcagctctttattggatgtgtacttgctgtccttaatcatattttcataagcatcttttccaaaataatagctgtgtgctttttctccgtgaacaatgaggactgcacttctgatttcattactgtactttaatattggctgattcataaatgacatacatccaatactgttccagccatcattggaattcaagcttcttttatgataacatctgcctttataatactcactgtaatcttttacaaagaaaggggcatcctctggaaccggaagagaaacacaaccaccagctctggaatattcgcctttacagtattcttgtgttctgagggtattcagcgactgcttcttcgcataacgtgcttcttcactgtcctcagaatcaaagtacccattcgcatttacccttgtcatatcatacatggtagatgcaaccgttgcttttattcttgtatcgagtgcagctgcgttaagagccatcccaccccagccacagattccaatgattcctattctatcttgatctacctcttcccgaacagaaaggaaatcaacagcagccatgaaatcttctgtattaatatccggagaagccatgtatcttggattgcctccactttcccccgtaaaagaaggatcaaatgcaatagtaaggtatcctttttcagccatcgtctgcgcatacagtccggaacactgttctttgactgcaccaaatggtccacttacagcaatcgctggatatttcccaaatgcatttttcggcttatacaaatctgcagcaagtgtgattccataacgatttacaaatgtcactttctcatgatctactttttcactttttggaaaagttttatcccattcagatactagttttaattcttctgctttcaacataaatataacctccatatgcaaattgtcttataattcaagaatgcctcggcattcttgctgcgaggtgcgcgtcatgcaattgcatgacatacttctacagcgcacctctgcaatcctgccggaggctatatcagctgggggattgactcccagctgatatacttttttcaaccttcctattttagttttctatattcttcatcacttaccggttcaagccattcattggaaccattttcacctggcacttctattgccagatgtgaaaaccattcatccggtgctgcgccatgccagtgttttacttctgccggaatattgatgcagtcgcctggcttcatttctacagcttctttaccttctacctgataatatcctcttccggcaacacataccagaatctgtccacctccactttttgcatgatggatatgccagttatttctgcatcctggttcgaatgtcacattgaaaattccaacctgagaagtagaaatcggtgcaagaaaacttctgcccgaaaaatactgtgcaaagccatcgtttggtgcaccaattggaaataccatctcttttgcatgcgcccgcatcgcttcctcttcgtatggcaaatctccttcgcctgtttcccacacttcctttgcaagattgaaaacagcccatgcttttggccaacctgcatagaatgcaacatgtgtgatcactgcagcaatctctttttgtgttacaccatgattttttgcattttgaagatgatattttaaagaagaatccgtaattccggaagccgtcagagcaaccacggtaataatacttcttgtttttacatcgatatcctggttattccagttttcaccgaaaagtacatcatcgttaaaatgtgcaaactccggtgcaaattcaccaagtgcattttttcctgctgtctgtactatttttttcatgttctgtatacctccatagcactgttatttataaagattttacccactcactgatttcctgttttgttccacgatttagcagtctgccttctgtaataactgcgtctgatgcagatgactgcaattctttcacagtgttcccaaatccacttccaccggatgttgcaaaaagcacgatctttttgccgctgaaatcataagtttccaaaaatgtattgatgattgtcggagccacataccaccagattgggaatcccagaaagatttcgtcataagaactcatatcgatctctttttccataatctccggtctgtatttcttatcactcatttccacactgcttcgggattttttattcatccagtcaagatctgcctttgtatatggaatcttcggctcaatctcaaacaaatccgcttttgcttcctctgcgatcatctgtgctactttttttgttgttccgcttgcactgaaaaatgccactaattttttactcataataaaaagcccctttctatacgtatttttcacaaaaaatagatgtataagatttacattcatcttacacatctattttaagctctatcgcttcattatgtctaatgcttatattgaattttgttttatgcctgaaaagcattaatctcctcgatcattttacggactgccaaagaatatgggatattccgtcgccaggcaatcaccgtactggtcgtgatttcaggagaaattcttcgctgtacaagaatatcttctcgccaatactttgttgcagcaccctcaattgaaattggataccccagtccatttgccgccataattccggcattcgttccgagattactcgtaaaagcaatctgtaattttgaaaagtctttcccaaaccagttggcaagttcactttgaacgttcattctttccggcaggatcaagggctttccaataagatcttctttttttataaactctttttctgtcagcggatcatccggccgcattccgacacaccagtgatcgcaatctgtgatccggatataatccagcccttcggtgtccaccggctccatgaataatgcaatatctacaagtcctttgttcatcatctcatacactgtatctgctgttgcagtatgcaatacaatctgaaccagcggatatttttctttatatgttttacatatcttcgccaatgtctccactgctgcaaattcaccgcatccaatggttatcgtgccctctacaaccttttcttttcctttcagttcctcaagcgtcctttcctcaagattaagaatctccaaggcacgcctttttaataaaattccttcatcggtgagcgatattttcttcccgtttcgaataaataatgttattccaaggtcctcttcaaatgccgccatttgtctggatagcgttggctgggtaatatgcaattgttctgctgcttttgtaaagctctgttcttttgctactgtcaaaaaataacgtaataatcttaattccatatctttatattcctacaaatttttcttgtaaccattctatcatattgcatcccagacatcatctatatttacatgtaatatctgtacaaaataccgtgggttattttggggttattttctaaccacctatgcccttcaggctgtgattttactggcttttgggcgaagctttcaaagagtgccgtggcagatgaacggtatttaatcgcaattattaaccgcctctgtaacacctctttttttctaacatatctttcgtcttggataaaactttaaggagtaagtattactttttattattttctcttgccataattcctgtaaattgttcgacaccgaaacgtctcataaacatttcacatttacacaggaataaatagtaaatatttaatccgcatccacttagtccttcataatttccctgtcccttagaaatcaacagatcagcattctcaacctcatccattgattccttagagattgcgccaaccacattacctggtaatccggtaccgtttccaagtaccttttgcgcaacatcttccatgtgaatgtattttgcatcttctagtgtagcatcatttaaaactggtttgcctcttacaatcacagttatatgtaaattaggattaatatcgcgaagagttgaaatcaataacttatctgttacaatttctccgcagttatccgtaaaataaaccagccttttcgcattgaccaagtcgtttttaaaaacatccaacagcttagaatctatatttatatttattgcttcatctaattgagctttcagctcaccttcatttacattttctaaagctccaaaatcaatatagtttccaaccattgcatactgtattgctgtttttaaatgattttcagatgtatcaactttattttttatatacggaaattgatcaagcattaattgattgtaatgctgtttgatttctgtataatccatcacatttccaaaaagttcctgacgaagattatccattttttctgcaacctgtggtgtagataacccatcactattctttacaatctccttcaccttatattgatattctgttatcttttcttctgttgcattaacaggatatttattgatatttcgttttatctgacattttttacattcttcatttattatcatgacttccgttaataacctccacttttgccgtatttaaatgctgctttatcttcacagctggtctcagtattcatctgattatcaactgcaaaaatcaaacatctccctgcaaatcattttcccgcatgttgttttgaaaatactttcataagcttttaatgcagcttctttcgataaaccatcctccataatattaaccaggaaatcagcctctaccaatatctgataatcaatttcatcaatattattatatgtatggtgatgtgcaatcaaatactggacccgctcagatacatcttgatcaaagcctaattctttgagcatcttttctgcaattgcaggaccttctttttcttgtaattttccattgcagtttccatatttttcttcgcagaaatgaattccaatatcatgtgtcaaagctgctgcttcaatgataaacaagcattccttatctacattttctgtttctgcgatcaattttgcataactatgtactttacaaaaatgttgaatcctctttgcatctcctctgtataattcaatcattgccaaatgtaatttatttatcattttaatgcttcctcctcttgcactatagaatagcttttgaattgattctctattttccgtgacatatgtcacatttttattcctgaatctgtgtcattagaaacggtcaattcaaaatgttttctatttgtttttagataaccttctttttgtaactttgatatctctgtagacattgccgcacgatctatacaaagataatctgccagctgctgccggtcaaaaggaatatcaaaagataacgacgaatgtctgatagattctgctgacagatacgacaatagtttatctctggttgttcgtttcccgacatgggtgatcttatcgttcaggatcagtatcttattcgccaggacactgacaaggttacggatcagtttctgatgatgctcgcatgccgtcgggcaggaaacaaggagtctctggacattcagggaaataatttcacaatcctcatctgctatcacactgatatttaaaacagctcccgggcttgctgcatatggctcaccaaagaaatcaccggtatggcattttgacagaatatttcgatgtccccagagatcttcctgaatcacaagaacacagcctgacagcacaagtcccattacctcggtagaatctcccgctctgaaaatataagaatttcgttctttggaaattattgttgcatttacacaatgcaatacggataatatctcgttatctgtaaggcctttgaagaatggactgtttcttagaataggcaaatattttttcaaaatcgttcctcctgttggaaatcaaacatacaagttgtatttattatactatgattctagcagaaacaaaagtgaaatgttataaatggagggtaaaaatgataagaaagattattcgaatcgataaagaaaaatgtaatggatgcggtgcctgtgcgaatgcctgtcatgaaggtgccattgacatcattaacggaaaagcagaattggtgagagaacatttctgtgacggacttggtgattgtctcccggaatgtcctacaggtgccatttcttttgaagaaagggaagctcctgcatatgacgaagaagccgtaaaagaagcacagaaaaaaatagttactcaaaatcaggcaatgtcctctcactccggctgtccgggatctaaaattatgcagattcggcggacagaaacacctgagtctgtaaaatcatcttcaaccgtagattctgtatcaaaacttcagaactggccagtccagattaaacttgcaccagtcagtgcaccatattttgacggtgcaaagcttttaatcgcagccgattgcactgcttacgcttatgcaagttttcataaggattttattcagaataaggtaacattaatcggttgccctaaattagatcaggtagattatagtgagaaattaactgcaatcattcaaaataacaacatccaaagcgtaacgatcgtaaggatggaagttccttgctgtggtggtctggagatggcagcaaaaaaagcgcttcaaaatagtggaaaattcttaccatggcaggttataacgataggtattgatgggaaaactatagaataaaaaaagaaggagaatgcaataatggataagaaaatgttttgttttcagtgtgaacagacagtcggatgtaccggctgcacaggaaatgccggcgcctgtgggaaaaaagcagatacagccagattacaggatgaactgacaggtgcgttgatcagccttgcaagagctgttgacggttcaactgctatttctaaaagaaccgggcaaatcataattgaaggattgtttactacagttacaaatgtgaattttgacaacgcatcaattgaaaacatgatacaaaaagtcagagctgaaaaagaaagactggttcctgactgcagcaaatgtcagtcaccatgcggtaaaacagatgaatacgatatgcaacaactgtgggatgccaacgaagatatccgttctctgaagtctcttattcttttcgggattcgtgggatggcagcctatgcctatcatgcaaatgttctgaattatgaagatgccgaggtgaatcgattcttctgcgaagcattgtttatgattggttatggagagagtgtggaaactctgcttcccacagtgctcaaagtaggagaaatcaatctgaagtgtatggcacttcttgacaaggcaaatacagaaacctatggaataccagaaccaaccgatgtgacacttacaatagaaaaggggccttttattgtcgtgaccggacatgatctgagagacctgcagcttttacttgaacaaacagagggaaaaggaatcaacatctatactcatggtgaaatgctccctgcccatgcatacccgttcttaaaaaatttctctcacttaaaagggaattttggaaccgcatggcagaatcagcagaaagagtttgatcatcttcctgctccgattctctacactaccaactgcctgatgccgccaaaaagcagctatgctgacagagtatttacaacagaaatggttgctttcccaggtgctgttcatatcgatgaaaagaaagattttacgccggttattgaaaaggcactggaactgggtggttacaaggaagatcagatattcacaggcatcaatggcggtacaaaagtgacaaccggttttggtcatgcggctatcctgtctcatgcaggtactatagtagaagctgtaaaatcaggagcaatccgtcatttcttcctggttgccggctgtgatggtgccaaaccgggccgaaactattacacagaattcgtaaaacagacaccttctgacagtattgtcctcaccctggcatgtggaaaatttcgttttaatgatcttgggctgggagaaatcggtggtctgccacggctgatggatatggggcagtgcaatgatgcttatggtgcgattcaggttgctgtggcacttgcagatgcatttggatgttccgtaaatgaacttccactctcctttgttctctcctggtacgaacagaaggctgtctgcatcttgttaacgcttctgcatttaggtatcaaaaacattcgtcttggtccttctcttccggcgtttttgtctcctaatattctgaattttctagtggagaattatggcattgcacctattaccacaccggaagaagacattaaagcactgatgaaccatagcaaataaagttttaacggttcagcacctttacagttgcataagctttcgagttatctataaattcaacaaagccgatgcgggattcaaaatcctccaccggctttattgattgtaatccccgaagtgaaaacgatcttataatatatactccatttgtctttcttttgttcgcattcccattttttcataaaatttctctgcggaaatatttcctgcccatacatttaatgttacttcataacatcccagctgtttcgcttcactttttacatattcaaacagactttcgccaatatgctggcctcgagcctcttgatcgacacatagatcatcaataaaaagagacttaaactgcaccatattatttgaaaagggctgctcctgtaattgacaaaatgcataccccctgcaaacatcattctcatctactgcaacatatatcggcttttctttatttttcagaagctctgccaattcatctatagtatattttgtcgtacccggaataaaaatatcaggtcttatgtctgcatgaatttgtaatacctgttttaatagctctaaaattcttggaatatctttttcttctgcttttctgataatcatttttactctcccattatcatatttgttttctccatctacttgtgaaaaaacaacgtcaatctattgtccagtataccacatcactgttaagaataccattcttcctatacgaataaaaacatactttttcagatttcaaatatacacttcctgccaaatatgatacgatatacacaacaaattacattttaaggagattttatatgaaagcctatgaacgtttactaaaatatgcagttataaaaacaccttctgatgaatccagcgattcaacaccttcttctgcatgccagtttgatctggctaatcttttaaagaaagaaatggaagaacttgtggtttcaaatattcagctgactgataattgtttcctctacgggaaacttcccgcaacaaaaggatatgagaatgcacctgctattggctttatcgcacatatggacactgtagccgattactgtaagcagccgattcgtccgattatcacagaacattatgatggtaaagaacttgctcttggcaatagtgggttaattttaagcccggaaatgttcccgcatttggaatcattaaaaggacatacacttattaccacagatggaaatacgatcttaggagctgatgacaaagccggaattgcagaaatcctgactatggttgaacatctgcagatggaatccattcctcatggtccgatttgtattgcctttactcctgatgaagaaatcggtaccggtgcttctcattttgatgtggagttgtttggcgcagattttgcctatacattggacggttctacagagggcgaactggagtatgagaactttaatgcatgcagtgcttcttttgatattcatggggtaagtgtgcatccgggctcttccaaggatacaatggtcaatgcttgtcttctggctatggaaatcaatagtctgttgcctttacacgagacacctcgtgacacggaaggatatgaaggtttctatcatctcattaatatgagcggagattgtggacatgctactctaaattatatcgtccgagaccatgacacagacaattttcaacgcagaaaaaacaaactcgctgatatcactaacgagttgaataaaaaatggggagaaaatacagttgaactgcatataaaagatcagtactttaatatgaaaaatattattgaagaacatatgcacctgatcgataatgcaaagcttgcctgtgaaagaaccggactcactccaattgtctcaccgattcgaggcggtactgacggatgccagctgagttttcgtggtcttccatgcccggatattggtacaggaggtcatggatatcatggcccttatgaacacatttctgttcagagtatggataaagtagttgatatgatgattgaacttgtaaagatatattctacattttcagtataatggtgaatccgatttataggttctagatgtaaaaagcacaagggataattgatgtccatcttgtgctttttactttagcaatttatttctcttttaacttttacactctattttatacatgcagatttttctgcatctcttctttaaattctcttcccttgaacaaaatcactgctacaaggaataagaaacacgtcaatgctccaaacatactcactgttggatttttcaccaccccgcataaaagcaagattaccggaaggattaatccatatccagcggccataatttcataaataagatactctcgcaccggacttttctgcactttagcagttacaaacattgctgcaagtgtagatacactcatgatcggcaacacaagatctacagaccagctgtgccatccggtcagtgcatcccatataaaacagatgattgtaccgataataagctgccacatcgcatttttcagcagattatgacgtttgaaaaatccgattgacgaggcaatccacatcgtcacaacgcctcctgctgtaaataaagtccatcgaattcttgggtggaaattcaaatccgtaacaagcattgccgcaacaatcgcaatacacagaaaactatagatcttatagactttcatttcctgttcgcttggcttacctgtctttggaaattcaggctttactttttcagatgtgattccctgttcttttaacaagcgataaaagttgcgttcaatgttcactgtgtcgtatctggatgtaaatgcaaatgataatttatcctggaaggaacacaaacataattcaagcttcggggtatttgtatatacgccaaatcgttcaatataaggtacataacttgcaggcattttaactgcgctcatattagaaaagattgctgttgtattcttctccgaatattttgcgcctgcctgaatacaaaggtttttaagttccaatggcgcaagtctcaaaatcggatgcaattccagtgctagtaactcgctgatatgtgctgacattttttctttcgttaattctgtctcaaaaaattctttcgtatatttcagaactgcttcaaagctttgatcttgtgttgtaaaattatatcccggttcgatccagttaaaaaaattcaacatcgatgaagacggaaaaaactttcttaggttaaccggaaccattaacacaaccggctttttcttctgcatcttagacatttcttcgtttattgccatcataaataatgctgtcaaaaagatcgtcatggatactccgagttctctgcttcgctttaatactgcctgtactgagacaacagattcatggacatgcagatgatttccatctttctttttccttcgtatctgaaaagcatttagttttctttttttcggtcgtttttgattttttgaataatattttaagaaactgtcatcttcctgatcttgtacagtcatatcttccggcagtaatgtaatctgttctaatccttcttctttatgcacaaggtataaataattctttaccagttcttttaagaattctgttgcccctgtaccgtctgtcaacacatgaaacacttcaaaattgattcgttttttataataagttacttcaaatagtagggtcttcttatctcttatatagagtctgctgcatggctctttatattcttctttaacaatcggctgtagattacacggttcaagataatgccaaaataatcccttacgaagtaccattaaaaacgtaggaaatgtttctatcgtctgattcagtgcttcctgtaaagctttaggatttacttcttcttttaattcacagtaaaatcgaaatactcttgtatcttttttgttactggcagcagaatataatttcgctgcgttgtctaatttcctccagcgtgcgtttttcttactcactgtgtttcccctttcaaaaattcattaatataggtgaaactttcctgtacatgaagctgcttgatccccaacgcgaagtatccatgtaaggcatctttaatccgatgtatctccacatgatttccagcctctttcaagcgttccccatacgcttccccttcatctcgaagtggatcaaattcacatgtaaggatcaatgtatccggctgattcgttaaatcttcagctatatacggtgcaaaataaggattcttcttatcctcctcatttctcgcataaagatcaatataatcctgcatttttccggcagtcaaaagataatcggatccattttccttaacagatacaaatggtgaattctctgtataatcattataggtagccggatagatcagaatctgtctgtttggcatgaattctccgcggtctcttgccatcaaagataatgctgcacagagatttccaccggcactgtctccgatcaaagtaatgttttctggtcttatatttaacataaaatctccagaatataccgcttttgcaacagcataacaatcttccagacctgccgggaatttatcttccggtgccagtctgtattcaactgcaactacatattgtccggttgcatccgcaagccgagcgcaaattctttcataattatcaatactttctgtaacccatccaccgccatgtatgaacaaaagcaattttttatcctgaatatcatgcttcttttcttcaatttctcgaaagcttttctcgcttggaaaaaatattcgaatcggaactgcatgacttccgttatatattttctcgtctactttcttataaaaaatcttcattggatccagtcgttttaaatccgccatatgacgaaatgcttccacttctactccatcaaaagataatgctttcaaaattttctttgctgtctgattgatcaatagtacattctccttatatccgttcttatgtctgtaaaagactacgagtccattatatcataaagtgctctgaaaaataaatttaatgttgaaaaaagcaccagccaactgaatgactgatgcttctgacatcaagatactttatttgtaactgttcagagccaagcaaaatttcaaaaaaaggtataaaatgcttgcattttttagaccgtttttgaaattttatttggcggatacgccacacctccgaaatgcgtagcattttggaggttggctctgaacagttacctttattttttataaactgtgttgccttttgcaatcacttcaacaagctgaagttcctgatcaagaatacaaagatccgcatcatagccttcttcaatcttaccttttcctttgaggcgaagaatctctgccggattagatgtaatcgtagaaatagctatttctaatggaatttttgttttgaatacacattcctttacttctttcagaaggcagctggactgtccaacgcccattccaaggaattcaccatcactactgtacatcggaaggcttccctgtccatcggaggaaattgtcatacgatcaggatttactcctgcatccaacatacgtttgataccattgcatacacgtacttcatcacagatagtttcccaatagtcaatatcttcatttccggtaaaatctactgctccacccttcaatgcatactcaattgacttacagaaaagcatctcattccggttgatatgtgttggaagtatttgagaagccggtatctctgtctcatctaccacccgttcaataagatctaagcatctcggactgtcgccaagatgaacatttacaataccagctttcccggaaagaacgccaccaagtcttgtatcagcaacgacacgtgcaaattcttcaaaagtcggctgtgaagaacgatgatcagaaattgcgatttctcctgttccaacaatttcctgaatcatcataatgtcttttacaatactatccgtcagtgtgcggaccggaatctgataactacctgtatagcaatatgcagacatcccctgctcattcaagccttttgtctttgcaaccagtgcacacatatcacgaccgattccatctgttccaaggcagccaacaactgttgttactccaaacttcgtaagtccttctatagttgcttctggagtacggttggcgaatccaccttcgccaccgcctccgagtacatgaacatgactatcaatgaatcccggagttaaaagtaacccctctccatcgatcacttctgcatcagaaagaaatccgtctgctgacatagaacctgcatctttaatcttgacaatcttgtcattgatcgtcaatacatcttttttccccagatgctgtggggcataaacatcaatactctgaattaatttcatcttaaatcactttcaattatcaaatgcctgttttagaatccaattccgacagcgatcagaactgtaataattgcaccaatcatcaatacgccgaggaatttccacatgaatttgatccagttagaccactcgatcttagcaattgcaagagatccgatcagacatcctgatgtaggaacgatcaggtttgtaaatgcatcaccaagctggaatgcaactacagctgtctgacgtgatacacctaacaggtctgacagtggagccataatcggcattgtgatcgcagcctgtcctgttccggatacaacaaagaagttgaatacggactggaacagatacataagtactgctgcaactgctccggatactcctgacagtgcatttgaaatattatacataattgtgttgataactgtaggtgtagtcggatcagatccaccaagaacctgcatgataccctgagccatagcaacaacaagcgctgcaccgatcagatcttttgctccatctttgaaagaagttgcaatatcattcaatctcatatcgttcagcttaaagataactccgatcacgccggaaacaattcccataataaagaactgtgtcgcgatctctggcatgtaatatccctgagtcataactccccagatcacccagactacggtagcagccagtgtcagaagaactaaaatgtgtccaagaccaaaggaatgtccttcgtcaatacctgttttttcgttctgttcacggaaatacgcatccgtctcatatgcgattgagattgtcggagcctttttgatctttgccgcatagaacatcgtcattccacagccaagagctgtaaatactacccacattaccatacggaatcctgctcctgagaatacgtcaatccctgcaataccctgtgcaatacctacagagaatggattcatccaggatgaaccgaaaccgatctgtgttgcaacataagtaacaagaactgcaataacggagtcatatccaactgctacaaataatggacaaagaatcatagtaaatggaagtgcttcttctcccattccgaaaactgctccaccaagagaaaacagtacgaaaagtactggaatcaacagtttttcggctccctttgccttacggatcaatccaatcaatccggattcgatcgcaccggtacggatcatgataccaaatgcaccacctactaccataaggaatgcgataatctcgatcgcagaactgcttacgattccgttatacatatagttgaagaatcctgttccaccatctccactaaagagtgctactccttctgttactacgttccctgcatcatctgtcagatactggaaacttccgtctttgattactgtacgggttttctcaacaccattaatcatgtatgaaatgtcctgtgtttcgtaaaatccctttggtacaagaaatgtcagaagtgctgctacaacaactactaaaaagataatgatgtaggtgtcaggcacttgaaatcccttgttaaaagactttaacccttttccttcttttttgctcatttttgagtctcctcccacattttttgatataccacattagtttaccacagaatgtttgaaaagtaaccaaaaatttatatattatatcaatttttttgtcatttttttatttttatacattttaaccgtaaataaatctgtgataatgcaaaaaattaacgcttctgccataaaaacaaaagcgttatgatataaaatcaattattacgagtatgaaattacaaatgtccaatcagactatgattatgctttccataatccattaagattacaataagcataaactttcacttcgctcttttcgaatacttgtgctatctcaacattcaacagctacttttataacaccatctctcttattctcaaagagatcataagcctcttcgatcttactgagaggataggtatgcgtgataagtggttcagtattgatttttccttcggcaatcagttttaacgtctcttcgcagtcacatccgtccactccaccggttttaaagataagattcttgccatacatatcaggaagaggtaagctttgtgctttatcataaagtgcaacaactgtcacaatcgcattcggtcttgcgcattcccaggctaaacgaaatgtagactctgcacctgcaacttccaggacaacatctgcaccgccgtggtcgcttgtattcttaacaaaagtctcacattcttccggagaaatagtaagtacatctgggtaatgttcattgataaaatgtatacgttcctcatctttttcacacataataatgtgtttcggatgcttcagcataacacaaagtaatgtacagataccagtcggtcctgcaccgatgatcaacaccgtatcatcttctgtgatttcagagatacgagttgcccagtaaccggtagccagaacatctccaacgaataatgcctgtcgatcggtaacttcatccggaatcttatttaatccctgatctgcgaacggtacacgcacatactcagcctgaccgccatcaatacgacatccaagagcccatccgccattctgatccgtacagttattgacatacccttttttacagaaataacattcaccacaaaatgtctcaacatttacagttactctgtctcccggcttcacatgagttacagcttcgccaacttcttcaacaattccaaccatctcatgaccaactgtaattcctggaactgcacgaggaacacttccatgcttaatatgtaaatcactggaacagatactggcaagtgtaacctttacaatcgcatccctttcatgcataatcaccggtttaggtttttctgttaattcaaattttccttttgaaacatatgtatatgtctgcatcgttttcccccatcatcttcaaaataatataaagttgcttattcttttggattatctccatcacgataaggtacagtagctgccggaacaaccgttgaagccggttcggtatgtatatcctgatcatcaaagaatatatgcgctccaaatgctgcaagtacttctgtcttgctgacaccgcctaagaagaacgcttcattgattgatacgccccagttgcggagcgttttcactgcacgttcatgcgccggagcatttctagatgtaaccagtgcggttcggattggctgaatatccttttctttaaacagctgttgtacataagacagctttgtcaggaagttagcaaacggaccttttgccatcggcgtgttcgcattcgctttctcatgttcttcaaatgcctgtattccgttcttctgaaaaatcttttcagattcggctgaaaagagaactgcatctccatcaaaagcaatacggatctgatctatcttttgctttgcatccgcatgtgccgctccagtcaaaataagacccgctgcaattccatcgttaatagccgattgtacatcaacagaatttgctgacaaaaacaagtctgtcttaaaggcttttaaatagggagcaatttccgctccacttgtcaaagtcgctcttgtaatatccaagccataatactgtatagaattaaagatacgaagacatgtgtttgcattgttccgtgacataatgatcacttccaccagtcttcccaatcctgtgttattcagtttcagaaaagctttaattaattggaaagcagcacctttctgaagaatctcattctcatgtgctacctggtaagcctcatatgcttcaacgccttgttcttcgaatattttattctcctgttcaagattaaataaagctctcgaactaatccctattacaagaggttttgataaatcatatggcatattttatcgtctccgatcaaaaaagaatcacgtatcaatcacatctttcttacattatacgtttccatactatgagatacaagtaagaatatataagaaaagattattttttgaattccactgcgtgttttctcttccacagtggaaataagttacgctgacatacgtaattctttcgttcatctattgcaatcgcatgaaagaatgtcttccacagatccgtatactcatcttcgtactcttctgtctttctcaatgtctgaaattcttcatctgtcagatatcggagatagttctcaccatctttcggatgaacacaagctgttttgcgattatcatctatgatcatccactgttctgaaggcatgcggtctgcaaaatgtctgccaaccaacattatgacatcactttttggctccagatggctgacatagacgttacttgaattcaatcgttcaaatcgtgcgaactctctgaaatgatggctttcgttagacactttacgacgcaattctaatatccgcatcacacgtggattcgcatattgctgtagtacactctctccaattttgaatccgacacgaaggaaattataaattgcctgcagtgcatcttcctcgacagataaagtcaccaaatagatattcagatatgcttcatccgaaatatctctccgaatcgagcgaatcactttttctgctttgaaaagatcttggtctacatgaatatattcatcaaatatcgtctgctgaaatacaggctctttttttaattgtatctggtcatgaccaatcagtaaagcttcagaccatgcatcatagatacaggtcatgatatcttccagacggtctttacaagtaaatatcttcatcagcatactccaaaatctgtcaatgtcatctgagtaaatgattcattcgcatgttgtgtgttccatagatctttcttgtctacacttattagttgtcgcgtaatataagatgcctcaataggagtatggtacatctgttttccaccacacgtgatgaaataatgcgcacgctttaatactactcccatcttcttcaggcttgcataatcaagtctgccataacgtcttgcataagtgatacgacttgctgatttcggtccgattcccggaacacgaagcagtgttgcataactcgctttctctacttctactgggaactgctccaaatggcgtaatgcccaatcacactttggatcaatcatttcattaaaattcggctgttctgaagataatagttctcctgcctgaaatccatagaaccgcaatagccaatcagcctgatacagtctgtgttcacgtaaaagcggtggtggcgttcctatctccggcaacacattatcttcgttcaatggaatgtatgctgaatagaagacacgcttcagatcaaagccctgatacaatgcctgtgtcgtctgcaataatgtataatcactctcaccggtcgcaccaatgatcatctgcgtgctttgtcctgccggagcaaaactacgcttcaatcgcgacatatcacgaggtgccaactggttcgcattctcccaggtaagtgcatgatccagtgacgtgtattttttgtaagattctaatcgattcatctgagaattccgagaaatgactttatccttcttctgaacattcaagcactcagaaaaatgttttttcgaagcatcagaaaaaatacctgcattcaaaaacttattcccgccacttcgctccatataagctgactttccgattgccattctgtgagatgcaatcgtactctgcaccttacccataggattcagaatgttctgcatggtcttgtttggagccaatgtatgcaatccttcttccgtgggcaattcaaggttgacactgatacgatccgcaagatatcctgctgccgcaagtagctcatccgaagctccgggaatcgtcttgatatgaatgtacccattgaaatgatatttcgtgcgaagcagcaataatgtctcgcacatcttctccatcgtatacgtcggattccttaagattccggaacttaaaaacaagccttcgatataattacgcttataaaactctactgttaagtcacagatttcctccggagtaaatgtagcccgctttacgtcattgctcttgcgattaatacaatacttgcaatcataggcacaatgattcgtcatcaaaatcttaagcagagaaatacaccttccgtctgctgcaaagctatgacaaatgccacatgctgctctgcattgccgagctctcctttctttccccgtcggctggatccacttgaagtgcatgcaacgtcatattttgctgcgtcagcaagaatctgcagcttttcctgtgttgtataattactatttctaatttctgtattcatatttccattatacaaacagttgttcgataatgcaagtattatttcgaacgggtgttctttttgtaactgctcaatatgttttgagcattcttaaagtacctgaaaaatcaagattttttctctattatcctcacctggaaacagatctgaagtattaatctcatcataaaaaatcaactgttcctgagtcattaaaatactgatatattcttctgaaggataatagaaaaataataatatctctctcggattttcataataagattcgtaaatccttgctaaaactgactgtaatatctctacagaaaaaggattaaaaaagtaacagcgatccacttccgacggaacttcataattttctgcactgcataatacaaactctgtgcgtgatgcggaaacggatacttctttattatctgctgctcctttataaatccgttcatcatactctacgcctattgtcttgcatcttgtttgatacgaaagataaaaacatacccgcccttttccggttccatagtcaattagagtattatttttcctgatcagtccactgtttgccaggcgctccaataccatataagacgttggttcataaggatatcgatactgatctgagtgagaatcatcccgcccggttgtctttatcttcaggagtttatcccattgtgtttcattttgattcatttctttcgatccttcatttttatgtttgaaatatccctcggtattttccccagttctgttaccatgtacataatctggcttccttcttctttcagccacttaattgactttttataatctgggaacaccttctccacctctgcccaaaatgctttcgaatgattcatctgttttctatggcacaattcatgaaccacaacataatccaacacctcaggaggcgcaagcattaaaagacagttaaaattcaaattccctttgctgctgcaacttccccatcttgttttctgatttctgatggttatattcccgtatgtaacccccattatatttgcaaaatattcaactttctttggaatgacctcaagagccttgtccacaagcagctttattttctcaggagtaaatttatctgtactttcagattcaaatcttttctttcgtgtcttaatctcttctatatgtttgcttatccaggcttccttcttcatgagaatctcttcaatatctttctctgaagcaaaatgcggagcccttacagtgatactcaaatcagaattcacctgaatagctacagtctttctgttcgatctaattattttaacatccataagtctttcctgtacctgaatttgttaagtgattgataaatagtaaactcttcctttatataatgccacctacaattctatccttattttatcaatcaatgtcacatctgccggaagccagtccacactgtccaattgctctttcgtaagccattttgccgcttctgcttctttcaataccagatgtccggttataacctctgcccagaaacaatccatagaaaggtgaaaagttgggtaatcatactctatagtgtcaatcaactctcccaccttgatttccgtgtccagttcttccatgatttctctttttaatgcatcctgcggtgtttccccttcctctatttttccgcctggaaattcccatccatctttaaattcaccatatccacgctgcgttgcaaatatcttatccttgtcacgaataatagccgcgactactctaatcgttttcatatttttcgtacctcaaatcatttatgctgttatatttgactgtaaatatcttaataaatcctctctcactgcatgctgcatcttcatcgtaaccttcgtgattggctgcatacgtcctcggttgtcttccttttgtgcatttctggcatccactatgtcaaactgtcccatataatagaaattcgtctccgcgtctgattttttcacaagcagatgttttcttccagccccaattacatcctgcatataagaactatccagacctttcccgatctgggaatcccatttaaaaatctgattatcttcaaatgcatccgcgtaatccggttttccatctacataatttttttcattctgactctcttccttgtgataggtaatgaaaatgaaaacatcatccccaattcgtttcattccatacataacagaagataaatccttcccacaattcataagcagactgacatctcttctggaatatttttcgtataatacaaacggattatctgactttcttcccggaagatatttgtcctgatatcttctgattccgacttttataatatcttctacttgcatataaaactgtatatgtgcaagcctgtctgcataactttgcactcttcggatcattccggaataatcactttctagaatatcaatctgacagaattttttatattccgcctctttactaacaaaatgtccctgtaagacttgcactgcctcatttacctgtgatgcactgatttcaaatccaaatgttcttcgatactcttccttaaaatctgcaagttcaatctgttcactttgaaggagtttgctaagtattgcaagttcatcgggacgtatccctgaaagaacagtttttgataaatattcaagtgtcaacttttcctgctcgcttagactattcttatatccatccttttccattgcttgcataaaagcataataggttttatattctctgatgattaccagtggatcaatttcctgattctcataaaaatcatataaaagcggaacccttcctaagcgattcttcaatgaaatataactttctttaatcaaagtcttcatccctttgatcttatcaattgatttaaaaatcttatccttggaaatctcgtcaaaatgaaccgtcgatgaacctggaatcgtgctgtttccactaattacatatttacggatcacatctgcattgtaggaacgatcccctgacaaagccaccggtatcataaaattgttattataatttccaatgaaatccaaaataacaacatactcttttcctggtgcctttctcagtcctcgtcccaactgctgaataaatacgattggagactgtgtaggtctaagcataataacctgattcacctcaacaatatccacaccttcattcaatatatctctagagaaaatataatccagcggctgcatttcttccgttgaatcttcctcatccatcgccagccgttcaaatgctgcctgacgtttttcttcactatcattaccactaagagcaattgtgcgatatcctaatgcattgaattttctcgataattcttcgcattccttcactcggctacaaaaaacaagtccttttacacgatcaccactatatccataatattctgactgttcgattacatgtcgtactctctcatcactggtaagcagattaaattcttcctttgtcagctttgcggcctgcaatgctttatcatccagagaaatgacctcgttaattccaaaataatggaacggacaaagaagattctcctccattgcctgctgcaaacggatttcatgtgcaatttgataatggaagatttcatagatatttttcccgtcctgatcatcatcccttttatccggagtcgctgtcatccccagaaacaatctcggtttgaaatattgaataaccttagtgtaaatgttgttcgaactgtgatgcgcctcatcaaggataatacaatcaaaatcatctggctgatactgaaataaatgcgtatctcgattcaatgtttccactgtcgcaaaaacataatctttctcatattcataggagcctgcacctactaatcccatcgtgactttcttatcgaaaaccttttcaaatgatttcttcgcttgttttgcaagagttactcgatgcactaaaaataaaatccttttaaatccaagttcacgcatagcaaatgccgatgcataagtctttcctgtacccgtggcagagatcaaaagtgctctctcttctccttgctccagaatctttcgcaaattcgcgataaatctctcctgcatggagtttggctttaatcgatatttttccagcgacgggatctcttctcttttcgcaatctcccgctgatgttttataatattataacgttctttgtaaatgtcataaaaatcatcataaggcaaggcatattcactgttccaaagattgtgaaactcttctacgatttcttcagccacttcaccattttctgtagaaatcagttttgtattccactctttatttactgtcaaagccgcacttgtcatattagagcttccaatgatgatacggtaaatctcttcttttttgaaaatatatcccttcgtatggaaaccatttccggcagcctccacatcatacatttttaacgtaatattttttaatccattgagtttttcaagcgctcgtggttcactaaaattcagataattggtcgtcagaatctgtccttttacacctttttcctcaagcccttttaatgtctgaagaagcggggtcacaccacccattgtgataaatgcaacgctaatctgaaactgatcacagcgcattaattcatcctccacagatgaaataaccttcttcccctcttccggattgttcgacacaaatgctggcttgtacgccaggtttgtcgccacagaaccatttatataagcggcacttaaaccattttgtaattcattgatcacattcgtatccattgaaaatctccctctcatctcgtaatgagcaaaatactctggttagtattatacctcataggcgaaggtttgtcattgaaatctgttggaggtaaacgtggtaaatgcagacgaaagaaacgataacaccaaaaaacatgtccggacgcgctgatgttaatccgtgtatctaaaaatttttctagattatttttttattgacattctttcattttcaatgtatcataagaggtaagaaatgggtttgttaccgtacagctattgctcaagcggggtgctcgtttctttttttatatttaccatatcatacaaatatagatttccatctgttgcatgcctaatcaacatttctatcctgaaaatattaaacctttcaagttccccagtattactatcataaacaggaagtgcaaatcttgtagtaaatctgtaccaaccgtattttgcatcaacattatgttttcctttataattttcttgccatcttctatttgttgcgcactgaagaagcataggaattccttgtgttgcatttgcttttgctttcgcatttgctcctaataatcttctcgtatccttagatccctttaattctcctggaaaatcagaacttataaatatttgatctgcagttttaactacttcgtaacaatttcctatatactccttcagatacttctcaacttcctcccaattaatgtttcttttcccttgaaaacgtatatcagtaataacaacaatttgttttccaactgaatcagatattatatttattctcttatccataaaaatactcccttctccgaacatacgcattgcgttatgctaaaagtaaaaaaataaactattacatcttaactgattacaaacagtcattagttactctattctatttatctactctttcgattcgacattctatctctgctctataatttaataaacgcaacaaatattccggaagctctcttttctctgcttcccaatcctgaactgtacgatacggaataccatagtaatcgctaaactcacgtctgttcattcccattttttctcttaattcttttacttctttccctctgctcatcatttaactctcctatctaaataacgcattgcgttacttaatagtacccgatataatctttcttgtcaatattcggacgcaccgatgttcgaaaaagatccaacatattatccagatatatttcttctctgacatggatctgatattccggtctagtcatataatacaacagaaattccaaaatcagtacacttccaagtcctcgtccttcaatcttaaaattaggaaatcccattggcatataaatatcttggatatcagtcatactaataaacccagggttctccattgctttggagaaaagatagctttctcctgcgcccggcgctacacagacatgatcctgacaattttctcccaaatttttccgactaactgtttcataacaagcttttctatctttacaaccaaaccaacagcattcattgcataggaattccacttttgctttttgctgtgcattcatcttgtttagttgctcgaattttttattaagacaaaaatactcgatataattcgtaaacctcaaataatcctggcagatgataatatgcttgatttttcatggtcactctcctcgcgtcaaaatgaaatcttatcttgccactatatactgtgatgcgtatactgcagccattgctccggtcacgctcaatgcaacataaagtgctgcccaccagcccaatcctcgttccatcagctgatttgtttctaatgcgaaagatgaaaacgttgtaaatccaccgcaaattccaacttttaagaataagatcaattgtggattccaatctttctttgcgccaaaggctactacgagtcctatcacaaatgctccgataatattgatcaacaaggtttttattggaaaaccattttgcgggttgattggaattaagccaatcaaataacgagctacagctcccaggaaccctcccgttccgactataatacaattcatcattttttgtctctcctacaagtaataccttagttaatgtctgctttattataccatctgtaatactgatctgcatcaaaactagctttagtttgtaaataatacatatttcaactttcctatctatatgataaatgtacctttttaaggcctgtggcatctaaggactttttgcatatagaaaaagctctgcgtacttctcacactcagagcttaaaatcttcttaaaagaatatcattatttgctttctggaatagaatcttttcctactgtcatcatcagaatgattgcagctataaagcttacagcacatgcgataattgcagcaagaacagaagaatcaaaacctgtctgaggattaattacctgaagccatccaaagattccgtttgttccatatacatactgttttactccaccaaatccgatgatagcaccaccaataccagatgcaagacaagctaacataaatggttttttgaactgtaatgttacaccgtaaatggatggttctgtaataccaaccattgcagaaataatagctggtccacaaacacttttcagttttttgttctttgttctaagcataatcataagaacaactcctgcctgtccaaatgcagatgcaagaccagcaattgtgataggatcgtaacccaatgttgcaagattgtttacagaaattgcaacaaatccccaatgaactccaaacataacacataattgaaggaaaaacttaacagcatctttcagtattccataatattccttcaagaactccctgtcttttgtatatttataatgttcaatcagatgcaaacagaaccaggcaccgcccattggccacagggtagatgatacatgattatcctgaggtgcacagtctccccagatatctgtgttatggtgacaacagaatccatcaattccatacatcttctcagcaacgtctttgccgtgcggatacattctttgcaaatgttctaacaaaggcatgtggagtttagataaccctgttttttcagcaatccagtaattcatctctatattgatattaattgtatacttggatccccacataggctcaaattcttcattccagattccttgtagatttgatggaagacttccttcacggctagagctgatcagaagatatctcgcaaaattataatatgtatttattaattcaatatcttctatgccattacgcatttgttcaagtctttctggtgttgtcagatgctcataagaatctttacaattcagtttcagattacttttttcatagtaagataaataatcctttatatgacgttcttgtaatgttccataagattctttttcagcattactcaatacatccatacaccactgaagcggatgttcacttcggaaagatgttcttgctgtgataaatagtgttgcttcttttgcatcctctactaataaatgacttcccattcgtgaaattttgccatttttagttcttacctgtacaagcaattcaaatgcaatcccgtgatttccaccttgtttcccatataaacggattttattgccatccaggacttcagtaccatcacagaaagatgaaccacgtcctgatcggttatcttttcttgttaaagataaatcaaaattaagaagttcgccatctgtggatttcatctgatatacaattatgtgatctggattgctggcaaaaaactctctttcgtattttcctttttccgattcatattggatttttccaacggctcttgaaatatctaattctctgttatacgtttgaacttctacgctttcatgctgaacgcttaaaagtcccccttgatcctttttgaagatcgttttgcctctctgtttgtaaaaatctatccaaacgtccccaagtgtctgataatgtcgcatatgcggatatgttgcatacatacttcgctctgcgagaagttcggcctgttcgatttctccatttaataagagttcacgaactttgggatagttctctcgcgcatcaggatttacacgttccataaaacttccggtccaaacagaatcttcgttaatttgaagtcgttccgttccgatttttccaaataccattgctccgagaaatccatttcctatcggcaatgcttcattccaatctttagcttcttcacgaaaacatattttattcatttcttcttcctcatcttttcactacgctttcttgaatctgttgttattataacaataaaaaaaagaaagactgaaaagtttctattttgcgaactttccagtcttaaaaattatggatgatttcatttttccattgggaatccgtatttattttgatacgcaattgcaattcgttcaattaacagctgatataaaacaggatggttttggactaaatctttatattcccaatcaatacatagatcaactcgagggtctttctccatttctctgtttgaagtaaacagaactacttttgcttttgtttcttcaaaacacttctttgatggagcatctgtcagatgcgtatactcactaatataccttccggaatttgaaaaaataagcagtagtgtattttcttttgcatgactaatatactctacttgttttctgtcatttgtagttgtgtaaatgaacttctggtaaaaagacattttatgttgaaaattcaatgcagcagtctctgaatatccttctccaaatgcggctacttcttcataatcatgaatcaacgtgaccaagtgatctatttttttagagtcagtattgaaaaataaatagcgaatatctgaaaacagcacatccagatattcttccgttcctttttacaatatataatctgtaatatttatcgtatttagatcttttatgtaaacttctcttttccctctactgtatgcttctgctttaaattctttgtaatcctcaaatcctaattgcttaacgaatttggagattgtagattttgaaacagagcataaatcagccatagcacctatggaaatgttattcaattgatgaatatgttccagcataactcgagcaatatgatgttctattgattcaggtgacatctcaccagttattgatgatagtcttgtatatagtgtgcccatatatcttctccctcacgattttctcttgtgataattctattttcataataacataaaaatgcttagagaagtacagtaagattaccaaagatgaatttatcacgttgatgagtgttctttgtaaatccgatatgcggaaatctcctgaaaatttctttccatcttctatttgttgcacactaccgttatcttaccgattatcaattttctccggaaacatatcatgattactcatacgattccaggcaacctgctcccagttggtacctggctttccataattacaatacggatcgatggacaaacctccacgtggaaggaattttccccagacttctatatattttggttcaagaagcttgacaagatctttcataattatattgatcacatcttcatgaaaatctccatggtttcggaatgagaacaaatacaatttcaaggatttactctccacaagacgttcgtccggaacataggaaatcgtgatcgttgcaaaatctggctgtccggtgattgggcacagacttgtgaattccgggcaattgaacttgacgaagtaatcgttttcaggatgtttattctgaaatgcctccaatacagacggatcataatccatacggtattctgtttgctgatttcccaataatgttaaattttctttttctctcattgctttctcctctatctcaacgcagggtcttctacgtgattcgcctgaaatgctgctgcgcgatcaatgcatgttccgcattttccgcaaggcttctctcccccttcgtaacaggaccatgtcaactcatacggaactcccagttctaatccaatccgtactacttcggctttggatacatttacaaaaggagcttctattttcagctgatgtccggagccttcccagattgcttcattcatcgcctgattgaataccggtgagcaatccggataagcaaaaccggcagaatcatctgcatgagctccataataaatcactccacattccttgctcagtgcgatacttgctgccgaagaaagaaataacccatttcggaacggtacatatgtgcttacaggcttatcgccatttgtttttgaaatctgctctgcgtaactctcctccggaatttcttccgtggactgttgaagcagtgaacaattgctatattgaaatattttgcttaaatccaggaacagatgctccacaccataatattcggcaactgctattgcagccctgatttctttatcgtgcttctgtccataggaaaccgagagtgcaatcacctgctctttcccgtactttttgattgccagtcctaatgccgttgttgaatcaattcctccactaaagagaactaatgctttcatctccatcacctcactacttatttatacgccccgttcatttggatcccagatcactttatgcatctgaatctgcagacgcacaccattcaatcgatgtttcagcataaattctacaatctgcactggttctatagatccaaaaacaggactaagatacacatgacacctgtttgtcagattataagtctgaatcacgtccagtgcttttaacagatctttctggctgccacatacaaattttacagtatcatcctttcctagcagttccatgttctctgttatcatatattcttcgcacccgcttgacggtaacttataatccattgtaaataccggtcgttcttcacaaaatgcagataaatcaactgcgccatttgtctcaatttcgacttgtaaaccggcttgtaaaagaaggtggatcaattctctgatgtctttttgcagtaacggttctccacctgtaagtgtcacattgtgaattccggttcctaaaacataatttaaaatctcttccggggtttcctctttatattggcaatcaggttcattggcccacatagtatcacaataactgcatcgcagattgcatcctttgaaacgaacaaagactgccaattctccagcccgtctgccttccccattaatactggtgaatttttctactactttcatctactcttcctcataaaccgcgcaattattcggtgtctcatatacttccacacaatgaaccccgtatccaagttccgttaattttttgtagaaataatatgcaaaattttctgctgtgggacgaaaggaaactttctccaaatgaaagtcctcattctgaagtgcagctactgtttctgctttcagagatcccacttcgtaaatcagactatggtcaaaggaatcacaaagctttttcagatcctttttcagattaccaaagtccactaccattccccgtgtctgtccttcttgctccagctcctgacttttgatttttgcaacaacattccaacgatgtccgtggatatttctgcattttccttcgtatttccatagaaaatgtgctgcgtcaaaactggcttttgtttgcaaataatacatatttcaactctcctgtatgtgaaatgtatgtacctttaagagctgtgaatcctaagcgaagcgttttatatagattgaaaaatatttcctgaatataaaaagctctgcgtacttctttgcacgcagagcctagaatctttttaactagccctggttttgtttttcgacaggaaggtacaaatgaactgtcggctgtttttcacagcatgaaaattataccacagaaaatcagtttgtcaaattggtttttctattttagcgaaatggtgtcctatttcccatattctattctcccaggaaatatcttccgtaagcatctgctgccttaattgctgcgcatacagtctcaggtgtcacctcaaatggcatgttatgaagtgtatcattctctgcacaggctgctgtcgcaactgccataagcttctcgtctgtcacttctgtaataccaagttcttttaatgtaacaggaagtcccagttcaatgcaccaatctataatgtcttccagttcttctgccggaatgtcttccagaacaagctgtgtgattgttccaaatgcaactttctctccatgatacatatgatgacactcgtccaaaactgtgaatccattatggattgcatgtgctcctgcaagaccgccactctcaaatccgattccactaagcaatgtattagcttcaattaccttctcaacagcttttgtgcaggctcctgcttccaaagcaagttttgccttcacaccttcattcatcaatgtatcaaagcacagttttgcgagtgacatcgctgccatagtaacatttccaccagcacaagttgttgcttcgctagcctgacaggctcttgcttcaaaataagttgcaagtgcatcacccattccggaaactgtcagtctgactggtgattttgcaatgatttctgtgtccatcagaaccatgtttggattagctgggaggaataagtattcttcgaatacgccttcatcagtataaataacagaaagtgcactgcatggcgcatctgtagatgcaattgtcggacagatcagtaccggcacttctttgtaataagcaactgctttcgcagtatcaaggatctttcctccgccaataccaataacaacatcacagcccttttcattcataacggctaccaaacgattaatttctgtcttgctacattctctgttgaaatactcatacactggttcaatatcatatccttcaaatccaactttgagaacgtcttcaatacgtttataccccgactctgtgatcagtacaagtgcttttttaccatacttctgagcatattcacccagctttttcatctcacctgcaccttgaacatatttgcttggactacataaaatatttgccatttttgtctgcctcctaaactccttatttatatgttattaaattaacaatctaaagatattgtagtccttctcagcaaaagtgtcaataaaatccaattgaattttctgtaagaaatcagctatataatcactactcacagctgtctgtatcaaacaacccttttattcatctcaacgtgcaaacacccctgctaaaaatcccctcttcttcacctgctgaacttctgccccacttctcataatcagcgcaaacattcccatattgcgaagatcctgccgcaggttcactgcctgttcttctgccaaaccatcttttactaagaatggcgtatcattcaggctcacattctttgtgaagtcatattttctcgcgatgcttacaaactctgacctctttccgatgtaatcaaccatacttccaagcgcgatcacctgttttgaaggatacaccgatggatctacttcatacacttctttttcatcaccgactggttcaaacttatattttgctgtatagaaatccagtgcctcctcaatataagaacacgcctctccgtcaagctcttcatacaaaacacacggcaaacttgctacaattcttcttgtttctgttttttccattcctgttaaaatctgcagaaatttagcaacttccaattcttttccgttacaatcaattaatgttactttataaaatagttctttgtttatcatagtcttgctccattatcattttttataacaaaaattttattttattataactgaaacagggtgatactgtctacagattttctgtttacagcatcaccctatattttacttattttcttactgaataaaatttaaaaattctcagatttcatttccagcctgatatccgctgcggattgctgctgagatatctgctgttctctcaccgctgcagtctccaacatatacaaatggaactgtcagcttactgtcgtcaaagagattcttcttagacccgagtgcattcacaattgtatcagcttcaattgtaacctctgactcgtcttttgtattcacagcatgaatcacattattctcgatggaattcactcttgtattcacatactcttttacatcgtgttcttcaaagtcttttttgatcagtggcattactgtttcggattctcctgttgcaatctgatccagcatctcgacaatgcttactttgagacctttctgtgcaaggaattctgctgtttcagttccaactaatcctccgccaagtactgcacatgctccactcacttcgcatcctgcaagaacatcccaggcagaaacaacattgctgtctgtaacagacattggaagatccatgttatgcgcaccgatggcaagaattacatgatcaaacttattcagctcttcacaatctgcttctgtatttaatttcacatctatagaaagttctggtagaatcttctcataatattcaatagatcttaaaatctcgctctttcttggcggaactgctgccaaatgaatctgtccaccaatcttatctgatttctcaaatacggttacttcatgtccacgttttgctgcaactcttgctgcctcaagtccggcgattccggcacctacaactgcaacctttttcttctcgtctgcaggtttgataaatatagttccttcgtttccgttctctgcatttaatacgcaggaaatgtatttacgtccctgaattgcatctacgcatcctttattacagttcaagcattctctgatgcactctccggatatagctttattggcaatatctgcatctgcaagcatggaacgtccataagctacgatatcggcatctccgtcttcgaggatcttctctcctgcttctaagctgacaacacgaccaactgttgcaaccggaacagataccagttttttcacttctctggcaaccggaagagtccagttatatggaacatctcccattggcggaattgtatctcccatgtttcctgtatggttcgcctgagcaacctgaatcatatcgattccagcctcatcaagcatctttgcaaaccggattccttcttctgcctcaagtccgccttttccacgaagtgatccatcaggatttactgtaatgattggcagtttatactcaatcataagatctggtgcagcttctttgattgctgctactacttcgagtgcatatcttgtacggttctcaagacttcctccatactgatcttctctatggttcagaatttttgaacaaagggaaccaagaagacgatctccatgtacttcaatcgcatcgattcctgctttttgcgcctttgctgcacatgcagcgatactgtttttaatatcttctaactgctcaaccgttgcctctgttacaaaatgctgcatatcatgatgaagttttgcataagcgcctttcgtaagtctgtcgcattcttccatctgtttctttgcttcttctgcatttccctctgcctgtgcttttgccgcagcctgtcttgcaatacctgcctccatgatcatgcgtccaactccaggaacatcatactccggatggaataactgaagtgcaagcttacagtcatacttatgtaatgtgtctgccagatttttatatactggaatctggctgtcatcataaagctttggtgtcggtgaagctgttcttacaggagctacatctccgataacaacatacgccactccacctttcgcaagtctttcatagaaattcagacttctctccccaatagatccgtctctttcttcatatcctgttgtaagcggtggaaacatgattctgtttttaaaagtaagatttccaactttaattggttctgataatttattccccatcttttttctccttttttcaattacagttcttctgcaagtttatgtcctgccgcaattgcatctttcagagttccgactttatcacagtctccgataaaatgaactctctcttctgtagtctctaccttgttcggtgcataaccgactgcaaagatcagtgtatccgcatctgtgatatgatattcctgtccgtctttctcataagtgatcgtagtctcatcaaccttcgtcacctgactgttcagttcaatctttacaccttttctcttgagtctcattgtcagctgactcttagctgctccgccttcacccggcatcaatgatggcgtcatctcgatcactgtaatgtcacggtttgcagggaacatgtcatcaatcagtggtgcaagataatctgctgtctcacatccaacagatccaccaccaagaataacaatctttcttcccggatattttcttcctgcaagaacgtcatcggctgtcattgtctgcttaaatactttgaatggagggatttccttcggaactgctcctgtagaacagacaacctcataatccttaaattctcccgcaagcatttccggtgttacttcgcagttcatacgaacttcaattccttcgtttttcagacgacgtgccatgaatttgattactttacaaagttcctgcttggcgattggaactgctgcaagtcttaagagtcctccgaactcaccactcttttcgcagagaacaacctcatgtccgcgtttcttagcaacgtaagctgcttccattcctgctggacctgcaccgattacaagaactttcttcttctcatctgcttctttgatctcgtcagactctacagatggattcactgtacagctgatcggattaccaaacataattcctgtcaggcagcgtccacatccgatacatggacggatatcatctgtttttccttctgcagctttattaacaaattcactgtcacacaggttcggccgaccgatcatacagatatctgtctttccgtttgcgataagttcttccgctatccatggctcattgattcttgcaactgtagataccggaatattcacatgctttctgatctcctcacttgcgtgtgcatgcggtgccggtgatgtaccaggtgcaggcatggagcttcctctcttgattgtatttcctccggaaacatggatgaaatcaacacctgttttctcaagctgtttggatacatagatcatgtcgttcagtgtcagaccaccttcactgtactcatctcctgaaatacgaacatcaataatgaaatcatcaccacaaagttcacggatctttgcaattacttcaagtgtcagtctgagacgtccgttaatgtctccgccgtactcatctgttctcttattataaagtggtgtaaggaatccaccgagcagtccatgcgcatgtgcacactggatctcgactccgtctccgcctgcgatctggaaacggcgtgcagcctctccaaactgctgaacaagtacatgcagttcttctactgttactgctctcggtgctgattttgcataataaggaccgacattggacggtgcgatcagctgaggtgttcccggaattggaaatgccatataagccggatgaaatagctgtgctaagatcttcgtatcatactgatgcactgcatctaccagtttcttccatcccggaatataagaatcatcatagattgacatatctcccggcaagtatgtatataccggctctactgtcgtaacttctgtaacgatcagtccaactccgcccttcgctctggctgaataatgctcaaccaacgcatctgtcacatagcctttatctgccatgtttgtggaaatcggcggcataaagattctgttctttaccgttgtcttaccaatcttaattggttcaaataaatgtggaaaatattcattcattttctgttcctccaatttgtttttttttcgttcttttgtcttacgattattttaacttataatcatttctgcttctgtgtatatcttaactttagacattgagtactgacgaatctttttatccagtaaatccattgtaagaagaacaccttctatttcagatattctcatttgtaccaactttagatcctggtatatatagtcaggaatcataccaaatccgacaactttcacttcctgtgggatgttcactccatactttcgaagagccgtcaacgcaccgattgaaatctgttgattttcaaataaaattccttgcggaagcggattttttctcaaccagtctaacaaagtctccgttatctttggaatttcatctccaagatcaagaatatgttttgcagatgcagtatcttcgttagactttgtatttaaaaatgcttctttacgaactcgataattataattatctttccctgtgcagaaataataaatatctgatgcaccttccttgtacagataatccacagcactttttagcatttgtctattgtctgcacatacgctgctataccgactatctggaagttcacagtcataaagaaccaatggttttttgattctttcaagcaggttttgatcttcttcttttaattcggttccaaaaagaagaacgcctgccacaaaatccatattacattccgtaattactgcttctatttgcgcaatgtcatcatttaaatacgtcactccataaagatatccaagtcttcttgcttcagaatcaaatgtagcaagtacatctgaccagagatctgtttctgaattacacgcagcacctttgctgtgattaacgatcactattttgatcatctgattcaccggatggccagacactgtaacgatattctcttttaccggaatcactccgttattcttcttcatttcttccagacattccaaaaccattcttctggtttcttcattgactcccggctttccgtttactgcaagcgaaactgtcgctttggaaactccgagatgccttgcaatgtctaccatctttatcttcatgtgtgatgcctcgttttttctagattgtagtaaaattaatttcaaaatcgtcatatattcaaactttaactatttctgaaaatgaatactgttcgtaatcattaattcttatattcctttattatcctatataactcattgttttattattataacaaactatcttgaaataagacagttttttgtgggtaatatttatggattaaaatatttctttcatatcattaaatgcgatcaaaaatcttccgaaatcataatcagaacaatactcttctgctcttttaaaagccatcatccatacaggcatatcttttatttataaaaaataatcaatttatgataatatagccatctatatttgcccacaagttagtttttgtgtgggcaaagtgtgggcaaagcactgtgtatgatttgtggtcaatgtaataaaaaaggaggtattcataaataattgtgtttacctcctaatttttttggttatatttgactatttttgtctattcttagaatttaccagcctttgcagcttcttctacagcaactgctacagcaacagtcataccaaccatcgggttgtttcctgctccgataagtcccatcatctcaacgtgagccggtacagatgaagatccagcgaactgtgcatcagagtgcatacgtcccattgtatctgtcattccgtaagaagccggtccagctgccatgttgtctgggtgaagtgtacgtcctgtaccaccacctgaagcaactgagaagtatttctttccagcttcgatacgctctttcttatatgttcctgctactgggtgctggaatcttgtagggtttgtagagttacctgtgatagatacgtctacattctctttccacatgatcttaacaccttctactacgtcgttagctccgtagcagttaactttcgcacgaagtccttcagagtatgctttacggaatacttctttcagttctcctgtgtgatagtcaagctctgtctcaacatatgtaaatccgttgatacgtgcgatgatctgagcagcgtcttttccaagaccgttcaggataacacgcagaggttttttacgaactttgtttgctttctcagcgataccgatagcaccctcagctgctgcgaatgactcgtgtccagccaggaatgcgaagcactctgtatcttcttcaagaagcatttttccaaggttaccatgtccaagaccaacttttctctgatctgcaacagatcccggaatacagaaagactgaagtccttctccgattgctgctgctgcatcagctgcctttgtacatccctttttgattgcgatagcagcacctactgtgtaagcccacttagcgttctcgaaacagattggctgaattccttcaaccatcttgtaaacgtcaagaccagctgctttagttacttctgcagcttcttcgatggagttgattccatactcagcgagttttgcaagaatctgtttttctcttctttcatatgattcaaataatgccattgaaatagtcctccttactcttttcttgggtcaatgatcttaacagcatcgtcaacacgtccgtactgtcctttagctttctcaagcgctacagccggctcgtctccagctttgatgaagtccatcatcttaccgaagtttacaaactgatatccgatgatctcgtcatcttcgttcagtgcgattcctgttacataaccatctgtcatctcaagataacgaggtccttttttcagtgttccgtacattgtaccaacctgtgaacgaagtccttttccaaggtcctcaagtcctgctcctaccggaagtccgtcctctgagaatgcactctgagttcttccgtaaacaatctgaaggaacagttctctcatagctgtgttgatagcatcacatacaaggtctgtattcagagcttcaagaagtgttcttcccggaaggatctcagaagccatagctgcagaatgtgtcattcctgaacatccgattgtctcaacaagtgcctcctggatgattccgtcttttacgttcagtgtgagcttacaagtaccctgctgtggagcacaccagcctacaccgtgtgtaagtccggagatatctttgatttcttttgcctttacccatttagcttcttctggaattggagctgcgccatggtttacgccctgggctaccggacacatcatttctacttcgtgtgaataaatcatgttaatactcctttcaatatgtatgattttcttcgtatacggtacactatttttttcgcacaaaaactgacagctctgcattattttttaacactgaactgtctgcgcggtgagaagttgatttgtcacctgccacaaactctttctccctgcaccatatgtatttattttcgcacaatttgtcgcattcgtcaatcacaactttgacaagattttcaccatctgagggaaagaattatataaatatgacacttgacaaatttatgtataaaaaaagcagctcctgtatccttttggaaacagttactgcttcaacttaatcttttcttattacaccggcatctcttccaccagacgttccttcagcatctccaatgctgctttcacagtatccagtctgttctccatccggcttccattccaacgacactctttcactgtcgtcttcccattcagataacatccaatatatacaagaccaaccggcttttcttctgttccacctccaggccctgcaattcctgttgcacttagtgccgcatccgcattcgcagcctttgcagcaccctcagccatctcatgcgctgtctgttcactcacggcaccgtaagtttcaagtgtctcatgagaaacgtgaattagacgttcctttgcctcattcgaatacgtaacatatccctcgttcagcacatctgatgctcctgccacattgactaacgttcctgcaatcaatccacctgtacaggattctgctgttgtcacatgaagtttacgctctgcaagaagatctactacaacttcttccagacttttctcacctgcagctttctctttaaaaaaccactccagatacatctcttacatgcctccctttgtaagaacctctctgtttgcccacacatagtctaccagagaaatcacagtaagtgctgtggcaatccagatcagtactgttccaaccatgtcgaatacaccgccaaaatcagcaatcagaacaatgatcattgccatctgggatactgtcttgaattttccccagtaatttgctgcgataacaacgccattatcagatgctaccagacggaaaccactgataataaactctcttgcaataataacaataacaactgctatcggaagttttcctgaaggaatcagacagatcattgctgagcagacaagaagtttatctgccagcggatccataaactttccaaaatttgttacaagattgtattttcttgcaatcttaccatccagcatatctgtcagacttgcaacaataaaaagtacaagcgcgatccatttattcgcagctccgcctacatctgtcaacataaagaaaacaaaaaacggaaccataatcacacgtaatactgttaatttgtttggtaaattcatactacatcaactctcctatcaaatcataatctaatgctccggtcactttaacctttgcaaaatctccggaaatcaattctacgtcagtattgataaagatcaggccgtctacattcggtgcatcacgataagttcttccaacgtaggcattctcatctgcgactttaccttcgatcatgacaagaacttctcttccaatcatgtcttccgctttatcgaatgcaatttcctgctgaagttccatgatatctgcctgacgatcctctttcacttcttcatcaatctgatcttcgaatgtggctgccggtgtatcttcctccggagaatacgtaaatgctccaagacgatcaaactcaagtgtgtcaatgaattccatcacctcttcatgctgctcctgcgtctctcccggaaagcctgtgatcagtgttgttctaagacagatatccgggatttccttacgaagcttctgcacaatgttgatcagctcctgttttgaagttctgcgtcccattctcttcaagatggtatcattcgcatgctggattgggagatcaagataatgacagatcttcggttcttctttcattacctggatcagttcatctgtgatttcctccggataacaatataaaatacggatccaacggattccactgatcttgcaaagttcacggagcagctttggaagagatttctctccataaagatcttttccataaagcgttgtctcctgagcaacaagaatcaattcttttacgccctgctctgccagatcctgtgcttctttcagaaggcgttccatcggtacacttctaaagtttccacggattttcggaatgatgcagtacgtacaatgtttgtcacatccttctgcgatcttcagatatgcaaaatgtcctcctgttgttacaagacgcttcgtctccggtaatggaagagcatcaaggtcagctgtcataacttcatgttgtcctgcaagtgccgcatctaccgcatccagaatgcgatcatatgcagttgttccaagaacttcatctacctccggaatctcatcaagaatctcctgacgatagcgctctgccatacatcctgtaacgatcaatgcctttgcactgccattcttcttatattctgccatctcaagaatattctggatgctttcctctttcgcatcatggataaaacaacaggtgttgatcacaataatatcagcctcctgttcatcattcgtcatctcgtaacctcttgaagcaagcattccaagcattacttctgtatccaccagatttttatcacatcctaaggatataaaaagtatcttcatatattagtaaaacctcctggtcatcctctctaaaaaatataaataaatctcaccttctgtgcatcatttcatacattccatgcatgtacaaaacgttcaacaacaacgtcaaaagagcagattgcacttttctgcatctgctccgttactgttctgattctactcttcgtcagtgtcctcaggtaagatcttaagctcaccttcattcagttcttcgattgcaatggaaagcggcttctgtccgtctttcacaggtacaagcggaagttctccggcgatcagctgtcttgcacgcttagatgtagccattacgatagaataacggctgtttacaaccttagaatctccctcttcaacgtctttgttaactactttcatcaagtcagtataagatggatgcagcatattaattttctcctttcaactcttccaattcttcttttatgtcattcataaaattcacattgcgtgaacttctgtggtgttctccctggataatagaatgcatctcttcaacacaatcatccagttcatcattcacgacaagatagtcataagcactcattccctctgcctcttcacaggcacggttcattctggactcaataacctccatcgtctctgtccctcttcctaccagacgggacttcagttctctggcattcggcggtgtcacaaacatcagaagcgtatccgggaacttttctttcactttcagtgctccctgaatctcgatctcaagaatcacatctttcccttcatccaacatcttctcaacatatgcacgcggtgtgccataatagttttccacgtatttagcatactctatcaattcattattggcaatcattttttcaaatttctccctggaaaggaagaaatattctctgccatctacttccccgtcacgtggacctcttgttgtcgcagagatggataaagcataattctccggatattttctcattaattctttcatcaatgtaccttttccggctcctgagaatccggatacgacaatcaaaatacctttcttattcatgatcctgccctcttttactctattctatattctgtatctgctctctgatcttctcgatctctgtcttcagactgatcgcatgattggaaacctcgatatcattcgctttagacaaaatcgtatttgcttcgcgattcatctcctgcgcaatgaaatccagcttacgcccgattccttctttctcctccaatgttgctctcatatgctgaatatggctcttcaaccgcacaacttcctcatctgtacagatcttatctgcatacagaatcacttctgctgccaggcggttttcttccatctgtgtatctgccagcaactcagtcactttctcttccagcttctgtcggtattctgccacaatctgtggagaacgttcttctaccgcagcgacttcctgctccagaaatgtaagcttcgcaagaatatctttcttcaggttctcaccctctgttattctcgtctcaacaaactgtgtaaaagccccttccagtgctttcttcagtccattccaaagctcctcttcatcttccacttgctcttccatcgtaagaacttccggaaatctcgcaagtgcagatacgctgatgtcattttccagcccgaattcttcttccatctgcttaaaatacttcatatattctgccgcgatcaatggattatatttcacagagctctgcgcctgtgacagatcttcatatgtaataaagatatcaactttcccgcggttcgcataagacttcagaagtgtccggatggatgtttcaaaaaaattaagtttcttcggcattctgatgttcacatcaagataacggtggtttacactctttaactcaacggtaaacttcttggaatcctgctgaatctcacatctgccaaagcctgtcatacttttgatcattgtcttcatcctctgtttactataatctaatctattatacatcaaatgtttgtaaatggtcaacaagtcttttataaagattcgatttatgttacaataaaaaaatgtgaaaacaaaccttttattcaggaggaaacaatatggcttttgatggaatcgttgtggcgagtctcgccagcgaattaaaacataaattattaaacggaagaatttcaaagattgcacaaccggaagcggatgagcttcttctgacagtcaaatcaacggaaggtcagtatcgtctgtcgatttcggcgaatgcttctcttccgctggtctatctgacctcgaagaataagccaagtccgatgactgccccaaacttctgtatgcttcttcgtaaacatatcagcggcggccgcattgttgatatctggcagccgggacttgagcgtattattcattttacaattgaacatctcgatgaacttggtgacctctgccggaaagatctgatcgtcgagatcatgggaaaacacagcaatatcattttctgtaacgatcagggtaagatcattgacagtatcaaacatgtatctgcacagatgagttctgtccgggaagttcttccgggaagagagtatttcatcccggacaccatgcagaaagcagatccgctcacggtaacttctgaagaattcgcagcgcatctgacaggtaagccaatgccacttgccaaagcaatttatacaagttttaccggaatcagtcctgtaaccgcagaggagatctgctcccttgcaggaatggattcttctgtcccggcccaggagtattctgctgatattttacttcatctatatacacagtttgagatttatttatccgcgatcaaagaagatagcttttcacctggtatttatttcgatggaaaagagccaaaagaattctctgctcttccactgagtcattttgtcaactatacaagggtagaatatgattctgtttccgaagtacttgagacttattattcgacacgcagtctcattacccgcatccgacagaaatcggttgatttgcgtcacgtagttcagactgcattagaacgaaaccggaaaaaatatgacttgcagctgcgtcagttgagagacacagaaaatcgtgaaaaatataaagtgtacggcgaattgatcaacacttatggatacaatctggaggaaggcgcaaagactcttgaatgcctgaattattacaccaatgaaatggtatccattccgatggatccattaaagacaccgcaggagaattcccagcgttattttgcaaaatacaacaagcaaaaacgtacttttgaagcactttctgttctttgcaaagagacattggatgagatcacttatctggaatccattcagacggcacttgatattgcactgacagaagatgatcttgctgaaatcaaagaagagctcacaaactccggttatatccgcagaaaatacacaaagaaaaaagtcaagatcaaaaacaaaccactccattacatttccagtgacggttatcatatgtatgtcggaaagaacaatcttcagaatgaagaactgacattccactttgcagtcggaaatgactggtggttccatgcaaaacaagctccaggatcccatgtcattgtcaaaacacatggggatgaacttccggaccgtacattcgaagaagcagccagacttgcagcttattattccagcatgcgtggctccgataaagttgagattgactacgtggagaaaaaacaggtcaaaaaaccaaatggtgggaaacctggatttgtcgtctattatacaaattactccatggtgattgacagcgatatcagcaatatagaagaacttgagtaatatgaaacctgtataatatgaaataagtggtaataacaaaaagaaggaagacttcagcggcatgtgcccggcctgaagcttccttctttttatatagcatcaaccataggatttctggcaatgtttcttttatttcgcagaattctttatttcatccggaacatggatttcatccaccttgttatagtccgtaaactgaagcacgatcgagtaaagatttactttcgtagtctctccgtaagacttatataaatctcccattacatcactcatgtctacaacgatcttcgccggaagcagttcttctttgtaaatgtcaaaaataacagggattttcaaattgcggattgcatcctcctccgggagattcaccagatgatatgcttctaccatctctttgccaagaagacccataagctccgttcctgttacattgccatacaactgataacatgccttgccatttactgttgtctcctgctcggacaggtggaaagactcaagcgctttcccttcctgcgcgaaaatatttccgtcaataccaaggtgattctcgctgcttccttctgcactctctttcttccaggatccattcgtgccactatatgtcacttgttttccgtcttcctctacctgataaagttccagatctgcagatacctcagaatctttgatcgtcaccctggcagttcctttcgcatgaccagccggaggctctgtcgtgttctccagatccatctccatgtttacttccatcagatttaaaatatcagacatctgaattgccagttccacatggtttgctgaagaagttactttctgcatattttccgaagactgacgaaaaatcttctttgcattcatcttcccggcacatccagaacaaaacagcataaccgcaacaagtacgatcagtaactgtacagatatcatctttttgcgaaatccactcttgtttttttcttctgttattccattttccaagctctgtttgactctaaaagccttccacacaatgcattactcccgtcctgccagataatcaataaactgctgtgctgttcttccagacaaaccgccatgagacagttcccatgcattcgcctcaagaagcagctgctcttccggcatattgattccattctttttcgcaagtacacgcacgatctcctggaatgccttcttatccggtgaaccgaaataaatcgtaacgccaaatcttgcaaccaatgacagcttctcctgtactgtatcatttgtatgcatatcttcatctctgtcctgcttatcacggaatgtctcacggatcagatgacggcggtttgatgtcgcatagatcaacacattcttcggtttcttctccagaccaccttcgattactgccttcaaatatttgtattcaatttcaaattcttcaaaagaaagatcatccatataaataatgaatttataatttctattcttaatctgagcgattacatcattcagatcctggaactggtgtttatacacctcgatcatacgaagtccctggtcataatactgatttaaaatagccttgatcgaggaagattttcctgttccggcatctccgaacatcagacagttatttgctttctttccttctacaaatgctttcgtgttatcaaccagctttttctttgcatcttcataacctacaagatcatcgagatgtacatgtgcaatgtttgtgatcggtatgatctccacatcagaattctccggatgctccacacgaaatgccttgtgaagtccaagtttaccaactccaaattccttataaaactgcgtcagtgtacgcttgaaatgatctacgttctgcgtcgcggcaagggcacggctgagatcacagattctatccctgacacgacggttgaacactttaccgccactgttaccgctcttataatccatgatgatcttcaggcagtcagcgtccagactcttttccagttcctcgaaatcatagtcaaacatttccttaaaaatagcgaaatcatgaagtgcaatctcattcagactaccttcaatctctcctacgatctcacaggaagtgctgtatgcattctcatcacttgcaagaagaaatgtcagataagtatgccacagattcccttcaaaaccgtggcttactgataattccaaaagttcattgatacaatcaaaaaggagtcctcttaaatcttctttattataaaattcactctcataattatcaatcaggaatgtgatatcctttaaaatctctccatattccatatttttatacagcatcagttcgtttgtacgcattctaaataacctcttttccagtaaatccctctggagctttcgctccacctgctctgtattctgcttttctatctattctaatatctagtaatttccaagaattctcaaattcgttgcttcttctctcagtccacgcaatgcattcttcactgctgcgtcctccagacttccatcaaaatctacaaagaaacgatattcccactgttttcctttcacaggtcttgattcaatctttgtcatatttatattattgtatacaaaatgtgacagaagatcataaagagacccactctgagccccactctgatgcggaagttcgaattcaatactgatctttgacgcatgcttcagataaaccttctgatttgtcaccacgataaagcgtgtacagttatccggctcgtcatttatattatctgcgagaacttccaacccatgaatcttcgccgcataggcactacatacagctgcctgtgccttatctccatcttttactactttctgcgcagcgattgccgtattcactacgctgatctgctgccagtctgcatggtcattcaaaaaccctgtcgtctgcataagggcttctgctttcgaataaacacgtttgatatctgtaagtgttgttcccggaagtcctgacaaagtatgcactaccggaaggatcgtctcagcaacaatataattctcaaattcatccagaagatcatacatctcgttcaccggacctgcagatgaattttcaatcggaagaaccgcataatccgcagccccttcttcaatcgcagtcattgcatcacggaatgttcttacatgaaagcaattcacatcttctccaaagaactgatgcattgccgcttctccgtaagcaccttctgttccctggaacacaactctggcagtatccttctcaagagaatcaatctgaataaaaggaagccttccaagtgcgcctgcttctaccagcttctgatactgcagttttctgctcatagacatcagctgcgtatataattcacgaaccccgttcttatcaaaatcattgtcaacctttgatgccacatctgcaagtttctcctgctcccgctgccggtcatacactttacgtccggctttcaccttataatctccaacctcacggcagacattcatcctcttctgataaagttccaccatctggttatctatcttgtcgagctctactctcagttcttcaagtgttgccatcctaacttctccttactaaaaaactccatccatactgcatctcttttatactgatttgtaacacaattaattatagtaaaaacactgcatgaacagtaccaagtataatacattttttccacaaaatctatcctttgaaaaaagtttattttcctgttgaaaatcttctcgttttagtatatcatggtatggaatacgagaacaatcggtttttatctgattcaagcgtctcgaataaaacattgggaggtatacaaatgaacgtttctgattgtatcaagatgcgcagaagcataagaaaatataaacctgatcatattgatcattctattattgattctattatttctattgcttcctattctccgtcttggaaaaacacacagatcactcgttatattgcaattgaagacccctctattctcaaaaagatcgctgatgattatacccctgtttacaattctaatattatccgtcaaattcctatgctggttgctgttacttttatcaaaagcagatccggttttgaacgtgacggatcctacagcacaaaaaagggggacagatggcagatgtttgacgttggtgttgcttgccagtctttctgtcttgctgcaaaagaacagggacttggtactgtaatcatgggcatctttgatgaggaaaaaattacagaacttttagagattccgccagagagggaactggcagctctgattgcagtcggctggccggatgatgatccgcaagcacctaagagaaaagccgttactgatctactagaatataaataatgtgattcaatcacacaaggaggttacttatgagacatttaatgagcccactggacttctcagtggaagaactggacgaactgttgaaacttgcgcaggatattgaggcacatcctgacaaatacgcacatgcctgcgacggaaagaaacttgcgactttattctatgagccaagtactcgtacacgtttaagccatgaagccgcaatgctgaaccttggaggaagcgttatgggattctcttccgcaagctccagttctgcttcaaaaggagaaagtgtatctgatacaatccgtacaatctcctgctacgcagatatctgtgcaatgagacacccaaaagaaggtgctccgatggttgcctgccagcattctaaaattccggtgatcaacgcaggagacggtggacaccagcacccgacacagacactgacagaccttctcacaatccttaacgtaaaaggaagacttgacaacatgacaatcggtctgtgtggtgacttaaaattcggtcgtactgttcactcactgatcacagcactcgtgagatacacaggcatccgttttgtactgatctctccagaagaattaagacttccggaatacatccgtcatgatgtacttgacaagatgaacattccttacgaagaagttgtacgtctggaagaagcaatgccaaaacttgatattctgtacatgacacgtgttcagaaagaacgtttcttcaatgaagaagactacgtacgtatgaaagacttctacattctcgacaaagagaaaatgaaactcgctccggaagatatgtatgttcttcatccgcttccgcgtgtaaatgaaatctctgttgacgttgatgacgatccacgtgctgcttatttccgtcaggttcagtacggagtatatgtgcgtatggctctgatccttacacttttggatattcacgttgactaatataatcatatttcatagtacgaaaggggtaacaaaatgttagaaaatacattaactgtaggacgtatcgctgaaggattcgttcttgaccacattgaagccggcaaaagcatggagatttataaataccttcacctggataaattagactgctgtgttgccatcatcaaaaatgcaaaaagtaataaaatgggcaaaaaagatatcatgaagattgaatgcccgatcgatttcatggatcttgatatcctcggattcatcgatcacaacattactgtaaatattattgaaaacggagagatcatctccaagaaacctctgactcttcctaagaagatcaaaaatgtgatccgctgcaagaacccaagatgtatcacatctatcgagcagggacttgatcatgtatttgtacttactgatgaagagaatcaggtatacagatgccagtactgcgaggagaaatatagccgcagataatccatcgtttatctatatcagatgtgggattgactcccacatctaatataagagccagaacagttaccgtgtgtggtatctgtcctggctcttataaatttaacactcttctgcaattttgtaaatcagcttctctgtatcttcccatcccagacatggatctgtaatagattttccgtaagtcatatgatcgcagatcttctgatttccttcttcgatataactctcgatcataactcccttgaccatcttcttcacatcatcattgtatcttctgctgtgaagaatttcgctgacaatacgaatttgttctttgaactgcttattggagttagaatggttcgcatcaatgatcgctgccgggtttttcaagtctttcttcgcataaacatctaccagacggacaagatcctcataatggtagttcggaatacaggttccatatttgtcaacaccaccacgaagaattacatgtgcaagatcatttccttctgttgtaacatccattcctctgtaaatgaaattatgagagttctgagcagcaattacggagttcatcataactgaaaagtctccactggtcgggttcttcataccaaccggaatgtccattccactggctgtcagacggtgctgctgattctctaccgaacgggcaccgattgcctcataagaaaggatatcgtcaagatagcttctgttctccggataaagcatctcgtcagcggatgtcagtcctgtctctttgatcgcgcggatatgcattctgcggattgcaatgataccctcaagaaggtttggagcctgatccggatccggctgatggagcattcccttatatccttctcctgttgtacgtggtttgtttgtataaatacgaggaatgatcatcagtcggtctgataccttctcgttcacttttgcaagacgattcacataatcgcacacagaatcttcattgtctgcggaacatggtcccacgataacaacaaatttatcggattttccttcaaaaatctcccgaatctccgcatcacgtttcttcttgatctctgccagttctttcggaagcgggtattccgccttcaggtttgcaggtaatggtaattctgcattaattttcattcccatggtcttaattcctccgttgtctgtctcttgcaaaagaatctatctcaaataacttcttccgcattattaataactaaaatacaaaaggagtttctaaatagaaactccctccattgattgagcaaaacgataagccgggttatgtcgttgaacaatcatctatctaggcgccgcgttaccgctgcgctcaagcgacccaccttaagcgtgacgggcagccacattgcttatattcggtcttgcttcggatggggtttacatgtgcccttcctgttaccagcaaggcggtagtctcttacactgcctttccacccttacctgcacaaaatgcacaggcggtttatttctgttgcactggcctgggagttacctccaccggacgttatccggcatcctgccctatgaagcccggactttcctcacctgcggcctttcggcacttgcagccgcgattgtctgtcttactcaacacagttttcaattatactaagaaatccctctgttgtccactgttttcaagattttcttcttgatttttattaatcaatcattgttttcgaattcttacagcccttcgtctacgataagattcgttccatctgcagcagttgttgcaagttcatcacatctttcattctgtggatgtccatcatgcccctttacccagtgaaatgtcacgctgtgtttctgctttgcttctaacagacgtttccaaaggtctacattcttcaccggttcattcttcccgcgtttccatcccttcttgatccagccgtctacccagtgctggttaaacgcattcacaacatattgtgaatccgaatagacttctacttcacaggaacggtttaaagcctccagacctgcaattacagccatcaactccattctgttattcgttgtcttctcatatccctgggacaattccttcttatgaagctgtcccttcgtgtcgacatactcaagcactgttccatatccgcccggtccgtccgggtttccgcgcgctgcaccatctgtatatatttttaccagcattttcaatctctcctgttattccatccttctgtttttatcttaatgaaaaagtatctaccacctgtaccacttctggaagtatatattccagatcttcctttgccatcttggcactctccggcagattgatcatcaatgtcttctttctgattccagcctctgaacgatccagaatcactttctttgtatgacgaagattataagccctgagtgcttccggaatacctggaagcagacggtctgctgtctccctcacagcatccggcgcacaatgcttctccaggaatccaactgctccggttgtcagaaccagttcaaccattcccgcatctgccagcttacagagcactgttttcaacatttctttatcctctggaaatgcttttgctgcccggacttcaatcccaacctgctccagcattcttttgagtgatgctgccgctgccacatccgcttttgctttatatgcccctgtatctaatgataaaataactgctctcatcttctgtctgcccctttcttaattctactatgatctccactcgtactttctcattatacagaacaataaacttttgtgcaactagaacaaagaatgtgccgaggcacattcttgcgcctgcggcggtcgcttgcgacgcctacattatacgccgcagtgcgcatcctaagcggagcgttttcaataaaaacaaaaagatgtcctgacagatctttcttccggagggctaatccttattattgatctgttaaaacatcttttcttaactagaaattgaatgagtatatgtatgactttctcttacaggtttgctttgaagaactcttccatcttagctgctgcagcttcttcgttctcaccttcaactgttacttcaacttccataccttttttgatacccatagccatgatagccatcagtcttgtagcgtcagctgtttttccgtttccggctattgtaaccttaactccctcaagagcttttgcttcttttgcaagcattcctgccggtcttgcgtggattccttcgttatcctgtactacataagtaaattttgccatgatacattctcctatctttaatttattttatttatcacctatttgtccagacaggtctggaaatgcctgctccagtacagccttcgcatccattgctccgaaacgctccggatcaatcctgtctatgcggatgcctttggactcatactgttctttcaggctttcgaaccgatgtcccagctgcggaccaagcagcagaacatctgtctgacctgtgtaaccctgaaatgcacgttccgacatcgctgtgactgcaatctcaagattctcattccgaatcagccgtttcatcttattcactaagaggctcgttgaaatacctgccatacagatcaatgttagatgtctcatcgtcatttcctttcctgtccctcgactgaccttaatttaacatatatttttaaaaagctccactcaaaaaatgaccacaatcaatgtggtcacttttgaatcactgaacatataatcacattcatcaaggagattaaatacattttattcttctgctctgcgcaataactggatcaacctgtcataatccggatgacgaatcagattctgcacatctgccggacgaaggatcagatctgtcgttgcctcatagaactgctgcagattctcatcctcttcccttccgatcgccgtcaaaaatacgacctgcaccttctgccggaaccagaatattggttctttcagaactgccactgcaacaaaagcacgctcctggaaggcacgctccgggtgtggaagtgccaccagattaccataatctgttggtgtaagttcctctctcttcaaaacagatgcagtgaatgtctccggaagtcccttctccttctcaaccttccggcacaggttcttcagaacctcatccttcgtctttccttccacatccgtaaaaaataattccttcttaaaatatttctgcagaaaatccttactctctcttacaaaaagctttctcaccctgtcaatgtcattgtcctgcagaaaggaaccaatctccaaaatcggtaccggtacataagaagagatatgtaccgttgtaaatacataatccactttttcaaacggaaagttctccagttcataaagattacatacataaatcttttcaatatactctttaaattctctgctgtacttatatctgagaatttctgaactcgtcttcccagatgcacatacgatcagaatcgaaaacttcttctgttcattctcctgctgctccaaagccagttcaagaacctctgcgagtccggcaatctcatcttctgaaatcgactgctgaaaatattcccccagtgcaattgccgcctgggacgccatcgtataagaaagcacataattcttacggatctcttccagcatcgggtttcgcaggatcatatgatatttcatacgaaggacaaacggaaccatatgtcggttcagctccatacgcagatgaaaatcattcctgaaatcaacatggaattccctgtagatcatctccagcatctcagtaataagacggtcgatctcgctttgcatcacgaaattttcctgttctgtctcactgtcgatataaaccttccccacaagctgcagtgtcagataattcttctcatcctgagaaaaatgaatctgataatgcgtgcccaccagctctgtcagttcttccacaaactgcttctcttttcttccaagcatatccgctgcctgcgattcaacatatttctcctgacgtatccttcgcattgccacataaatatgttccacaaagtcattgtaagcaatctcagaaagttcgatttcatatttcttcagacactgatagaccattttccccagtgtctcgatctcatccgtctgatgccgtcttccgattccttccagactatcctgctttacaaagacatccaccatacactgacgcagattaaattcactgccttccacacggataccataccccggtttcttatgaactgtaataccatacttctgataagtttcctcaacctgccggagtgtattcgtcagcgtccccttagaaatataaaggaaatcacacaactcctctgacttgatatattccgttctgttcagaagatatgcaaggagaaaatgtactctctcctgattattcgacggaatcaccggatcttcattctccttcggattcagcagtccttcgataccttccggctgtcttggatccaaataatatccgtacctggactttgataaaatctggatcccattcttctcaagctccggattcagttccttgatcctgactcttactgtcttcacgccaattccaagctgaccggccagttcactcgcagtcacatgttctgttttacacaataattcaagaatctttctctgttggtgattcagcaacactgaattcctcgctttcttttgcatattttacttactgtttatcttatcatattttcctgtaaaaaaaaagctcacgatcactatataataatgcagaccagaccaccattgctgtcgtttacgatcttctgcatagaatcctgcagttttacctgactttcttcgttgatcagtgtaatcttattacgcataccatccatcacaagatcttcaattgatttgccaaaaatatttgttccccagacgccttgtggaccttcgctctcttttttaatatatgcaacaaggtcttctgcctgtttctcacttcccacgatcggtgcgatctccgtttctatattcgcacgaatcatatggatcgatggtgcctcggaacggatctttactccatatctacttccctgcttgatgattaccggctcatccagatgaatttcttctttcttcgggctgactactccgtagcctttcatcttcacatccgcaaatgcatccttgatctgactgaattcttcttttatagaagaaagctctttcatcagagaaatcaattcatactcactgcggatctgagttcctgtcaactcactcaacacttcataataatacttctggcagaaagaaatccgcaatataacctttcctgtgtccatctctacctgatccaacaggatctggtctatgtatggactttctgtcttccagtcttttccggagacacttcgcagatctgacatctgagccataattttcttcacattctcaatcagatctttcttgattctgtgatcacatgacaacatttccacccatttcggaatataaaattctatttccgtgacaggaaattcatacagtacctgacgcatcatttcataaatatcgtcttctttgagctgttcacaattcaccggataaacaggtgccgcatatttctcttcaagcactgatttcagacgttccgtctctttcgaatacggtttttggcaattcaataaaataagaaatggcttcccgatctgccggagttctttcaccgtccgctcttctgctgccacatagttttctcttggcagatctgtcacacttccatctgtagtcacaacaaatccaatcgtcgcatgatcgtgtatcaccttttgtgttccgatctcggctgcctttgtaaatggtatctcatagtcataccatggcgtcttcacctgacgctcctgcccattctcagtatggccattcgccccatccaccatgaacccaacacagtctgccagccggatcttcacctctatgtcatctgaaagctttacatccgctgcttcttttggaacaaacttcggctctgttgtcatgatcgtagttcccgatgctgcctgaggaagttcatcttgtgtccgctgctttacatgctcttccttaagattcggtaaaatcaaaagctccgcaaaacgcctgatgaacgttgacttgcctgtccgaaccggccccacaactccgatgtagatttctccgtttgtccttgctttcatatccttgtatacctgaaatgaatccataaaaatacccccttgttctgctgataccaatgtatgcagccagacaaaggggtatgacttttaattttatattcgtttcgttctcttattcttcccagagaagagaagagttctcaatcttagactcgcgaagcatcaggtcatctactgcctgttttggatcctttccttcaaaaagaaccttgttgatctcatctacgatcggcattggcacctcatatttctgtgcaagctttgtagctgctttcgcagaatagacaccttcaacaaccatgtttacttccttcatagcctcttccatagacttgccctgtcccatcaagtaaccggctttacgattacggctatgaacactggcacaagtaacgatcagatcaccgattccggtaagtccacaaaagctctcgaacttgccgcccatcttcacgccaagtcttcctatctcaacaataccacgtgtgatcagagcagcctttgtattatctccatagccgagaccatctgcaattcctgccgcaagtgcgatgacattcttaagagaacctccaagctcgattccaagcatgtcaggacttgtatacacacggaatactttactgttaaatgcagactgcaagtactctgctgtcttttttgtctttgcaccgatcacgcaggatgttggaagctttcttcctacttcttctgcatgtgtcggtccactgagcactgctacgtccgcctgcggaatctcctggctgatctgctgagacagcgtcatcagtgtatcttcctcgattcccttcgctacatcaacgatcatctgcccatcaacaacatacggcttcatctttgccgctgtactccttgtaaagatagaaggaactgcaagaactaagaaatcttttcctttaatagcctcttccatctcatttgtgatcataatctcttctgaaatatggacacccggaagttttgatacatgctcccgcttctcactcaacatctccacttctttcggatcgatcgaccagacagttacatcatgtccattatcatgaagaaggattgccagagctgttccccagcttcctgccccaagaactcctacttttgccatatcatctctccttttcttcgcttcttttatttctttgaaccgaatttattctctgttccattcaacagacgtttaatattggcgcggtgtctgtaccatgcaagtgctgtaagtaagaacgtgatcacatataactcatataccgcacccttcgccatatcaaaccatccaagctgtccgaagatcaccatctggataaaaaacactgcataagcaagcaatgaaccaagggaaacatatcttgtcacaagcaccggcacaagaaagaatgccagtgtaacaaaaaacaggatggaactgtacggcagatgccaaaaacagttgcttaccacaagtgctgccataacagcgattcccttcccacctttaaaattcatataaaatgggaagttatgccccaaagtaactcctgctcctgcatacatcatcagaagcggaagaatattacttccatggtatatcgcacggacaatgagaactgctgcaaaacacttcaatacatctcctgcgaaagtcataagtcctgctttcaatcccataacacgcagtgcattcgtcgaaccggaatttccgcttcctgcttttcttatatcaatatgatgcatctttccgaccagataaccgctctgcagaagtccacaggcatatccgatcaccagacagataatacgttccattctactgatccttttcctttctctcacggatgaagaacttcagtgaagttcctctgaagccaaatgcctctcggatcttattctcaagatatcttgtataggagaaatgcatcagctccttgtcatttacaaagataacaaatgtcggcggcttaacagcaacctgtgtaatataatagagttttaatctcttgcctttatctgacggtggctgttgcatagcaactgcctctgtcatgatctcgttgagaactcctgtcgcaatacgaagtgtctggttctcaataaccatatcgatcatgtcatacagtttcggaagtctctgtcctgtcagtgcagatacatacatgatctctgcatacggcatataagaaagtacctgacggatctttccttcgtattctttcattgtcttatcattcttctcaatggcatcccatttattaacgacaatgataactcccttgcctctttcatgagcgattccggcaatcttcgcatcctgttctgtgacaccttctgtcgcatcgatcaccataagtacaacatcggcacgctctactgcacttacagtacggatgatactataacgctccagttcttccttgatcttattctttctacgaagacctgctgtgtcgataaaaatgtattcctttccgttatgcacgatctctgtatcaatcgcatctcttgttgtacctgcgatattggatacaattacgcggttctcaccaagcagacggtttacgatagaggatttaccaacatttggtttacctacgattgcgatacgcggacggtcatcatcctcttctgatggatcccactccgggaaatgtgctataaccgcatcaagcatatctccaagaccaagtctggatgctgctgagattggcaccggatctccgattccgagattgtagaattcatagacatcagccatatatttatcaaaattgtcaaccttatttacaacaaggacaaccggcttaccggaacggcgaagcatatccgcaaccttagaatctgaatccacaagtccctgctttacatctgtgataaagataataacatctgctgtgtcaatggcgatctgtgcctgctctctcatctgggaaagaatgatatcactgctatccggctcaataccacctgtgtcgatcagtgtgaagtctctgtcaagccagtcaacatctgcataaattctgtctcttgtaacacccggtgtatccttaacgatggagatcatctctcctgccaggacattgaagagtgttgatttacccacattcgggcgccctacaatggcaactactggtttactcattctattcttaccttcctgttttctcttattttctcttaaatagtttctcttaagccgtagtgatcctacggtctttcatctgattcttatctatatctgtgggattcggacctgcgacacctaaaatagcatcgatcagatcctgtccgcttgattttacaatatctataggaacttgtaaagtatctgatacttctttcaatgtaaagtcatcaaggaaaatgtcctcgtccatcttcagcatattgcatgggatcagaagcctgcttccaagtggctgatcttttaattgcttcatcagatcctgtcctgtgatcagaccagagactgtgatacgctctccgaagaaatcattccggatacaatatgtgtgaaccttaagtccctcatacttctcctccatcttcttcgccatacgctcaagatacggatatgcaagctttgctgttgcaagagaaatctcttcctgatgttctccgctttccagcttcgcataaccttcttcaaactcattaaataaaagacgaagcattccaactccattctccagctgaagatatccgtcataacgttcctcttccggaacttcttcctctgccagcagataccactcatctcctgcatgaataaaatggatcccgtattctgcgtagactttcttctgccacttctcaatcgtgcgaatgacttccttcgcctcttcctttgtaaatggctctaatggatacaatccatctcgatacttggaaagtccaaccggcacaactgacacactgcgtaaaagcggcagatactgcgtcaggtcacgaatactccgttccaattcttccccgtcattcactccacggcaaagaacaatctgtccgttcatctcaatgccgccctgatacagaatatcaactttcttcaaagcctcccctgcaaaacggttatgaagcatcttacaacgaagctccggattcgtcgtctggaacgaaatattgatcggttccagtctataacggacaatacgattcatatccttctcactcatatttgtcagtgtgacatagttcccctgaaggaatgatagtctggaatcatcatccttaaaatacagcgtatcacgcatccccggcggcatctgatcgataaaacagaaaatacatttattatggcaggaatgatactcatccatcagtcccttaccgaaatcaattcccagatcctcatcaacatctttctcaatttcaagctcccattcttccccgttcgcttttcggatcacaacaagcagctcctcagattccacataaaactgatagtcaaaaatatcctcgatcacctgaccgtcaatctccagcagaatatctcccggttcaatccccagctcttccgcaatacttcccggccgcacactttctataatgtgttcgtgctttttcttcatctataaaaataaactcctttatccaattccataaaaatccttctgttaatttctttgcagcaaaaatccccatattatagaagaaagactttcatgattcttaattttacaccatatcttataatatcacaatcttccagacgaataaagcattgtttttttgcaacatttttttcaacaatcttgcatttttgttccattttcacttgacgtatcaaataatcgtgctataatttaacacatgacatcttacagtttagtgctttaaagcgtaacggtttaaagcgtggattgtatgaatcgaaaaagggaggacacaatcatgaaatctaagaaaattttagcagtacttatggctgccggaatgacactttcacttgcagcatgcggaagttcatccgactctacagataagagcgcagacaacggatccgattcaggaaagacttataagatcggtatcttacagcagttagagcatgctgctcttgacgaagcaacaaaaggatttgaagatgcctgtacagaaaagttcggagaaggcaatgtcaaattcgaccttcagaacggccagggcgagcaggctaactgtgctacaatcgcaaataacttcgtagcggataatgtggatctgattcttgcaaatgcaacaacagcactccagtgtgcaagcgcagcaacaagtgatatcccgattcttggaacatctgttacagactatgctacagcacttgatatctctgactggacaggaacaacaggcatgaacatttccggaacaagcgatcttgcaccgattgatgagcaggaggcaatgctcaaagaactcattcctgatgctaaaacagtcggacttctctactgctccgctgaaccgaactcagcatatcaggcaaagcttttcgctgaagcattagagaaagatggaatcgcatacaaagagtacacagctgctgattctaatgagattcagtccgttgtaacaaatgcagtttccgaatgtgatgcactttacattcctacagataacacaatggcttcaaacacagaaatcatcaataatatctgtctgccggctaaggttcctgtaatcgccggtgagcagggaatctgtaaaggatgcggtattgcaacactttctatcagctactacgatatcggatacaaagccggtgagatggcttacgacatccttgtaaacggtgctgacattactacaatgaagattgaaagtgccccgaatgtaacaaagatgtacaatcctaccatctgtgaggaacttggaattactattccagacggatatgaagcaatcgaagaataagattcttccattcaaccggaacatattaattagaagatattaaacaaaacatatttttctcaagagcgggcttcatccagatgaatggtcgctcttgattctagttactgttcactccgttcacagcaacttggtcaaaattcattccaaatcaccttcggtgatggaattttgccccgtatgtctcgggattttgccatattcatggcaaaacacctcgcgggatattacctgtgaacagtaaccttaattatacttatctatttatatgaaacaataaaaagaaagattagagggataaatcatggcagcatatttcgcagcccttgatccaatgactctggtacgtgctctcccgggcaacgtggcccagggcattatctggggaattatggcactcggtgtttacattacatttcgtatacttgactttgcagatctgaccgtagacggttcacttgcaaccggcggtgcagtcgcagttatgctcatccgcgcaggtgtgaatcctgcacttgcacttgtctttgcatttcttgcaggtatggcagcaggatttgtaacaggagtcttacatacatttttcggaattcctggaattctggcaagtatcctgacacagatcggactttactccgtaaaccttggcattatgggaaaatccaaccaggcggtcaatgtcatgcagtacaaactggttgcttctcttcgttatgtaaccggagaaggcaactggatcttcttcctgaaattaatccttgcagcactgattctgatcgcactctgctactggttcttcggaacagaactcggtgcatccatccgtgcgacaggatgtaacgaacagatggctcgtgctcagggcatcaacacaggattcaacaaagttcttgcacttatgatctccaacggtcttgtaggactttgcggtggaatttacgcacagtaccagggcgcagctgatgtcaatatgggacgtggtgcgatcgttatcggacttgcagccgtcatcatcagcgaagtgatcttcggaaaattctgtgcacacagaaaagcagcttttgccttcacactcggtgcagtcttcatcggagcaatcctttactaccttgtaatcgcattagtactctggctgaagatgccatctgattatatgaaactgttctcagctgtagttgttgcatgcttcctcgcagttccttatatgaaagatacttacttcaagaaaggacgggcaaaataatgggatacatgttagaaatcaaagatatttataaaacatttaacgccggtacaatcaatgaaaaacgtgccctcaacggagttaacctcaacttaaatcccggagatttcgttacgatcatcggaggtaacggcgccggcaaatcaacaacattgaatgcgattgcaggtgtatggggaatcgataaaggaaatattatcatcgacggtactgacatcacaaaactttccgaacataaacgtgcactcttccttggtcgtgtgttccaggatcctatgacaggaaccgcagcaacgatgtctattgaagaaaatatggccatcgctgcacgccgcggtcagaaaagaggccttggctggggcgttacaaagaaagaacgtgaacactatagagaagcgttaaaagaacttgatcttggacttgaagaccgcttaagcagtaaggttggtctcctctccggcggacagcgtcaggcgatcacacttctgatggcttcccttaaaaagccgaaacttctgctccttgatgagcatacagccgctcttgatccaaagactgccgcaaaagtacttgcactctctgacaagatcatcagcgaaaataatctgacagccatgatggtaacacataatatgaaagatgccatcgcacacggcaaccgcctgatcatgatgcatgaaggaagagtcatctacgatgtatccggtgaagaaaagaaaaaccttaaggtatctgaccttcttgcaaaattcgaggaagtcagtggcggagaattcgcaaatgaccgtatgatgttaagttaatcatttgcgttataattatgccatcttcataataaactttttataaccataaaaggaaagacgataggttcaaatatgagcttatcgtcttttcttaaataatctttagtttgtctgttataaatcaaattccttcaacaacttttcctgatactccctgtcagctgctgctttcacgatatcatctgtacgtccaagctttgataattcaagaattagttgattaattctgcttactcccaaagtttccccttcttctcttccaattttgcgtccagcttcaattcctcgtctttctgcggttaacatgcctatattataatctctgattgctctttgtcttgtctcgtattctaacctcttcttttcatctgcacttaatttatccaatacgtcatacgcttcttccaattctgaattcttctttgccatctcttcaaaatcctttctggtttttcctccaagaaagcgcatccactgtaacaagcttgtctcattcttctcttccggcggaagtttcgacaattctaagatatgcatctccataagatctgtatactcttttcctgtcttcgtatcacaaaatgcaattcttcgataatattctttatcatctagaaaatgatcatatgcaagaatactcacatggatacacttcttcaagcaatcgtatccatcgccttcttttatttcacttgtatacatcttactcagataataaaccgaacgatttgcccagcaatcaaatgcttctacctgcatctcaaagtcaatctgttctccatctttcagtttcacccggacatctaatattccatacttatcatctttcgattcttttctaagaatcgtaggcataagttccgtattctctacctcactgggcggaacgtttagtagtgctgcaatgatattcttgcggatgttatcattctgcattaattccttgaaacagaaatctaccgttggaagcatgataaaatcttcttgcgtctctttcaatgctttacaatgtgatgttgctctcttagttgatacacttttctcgttttctttcatagaattctcctctcttctgtacaataaatacttgcttgaagaagaggattctaaagttatatttatcttaacacaagatagttttctatggaagtaactatcccgttaaaatcagatatttgagaaacagtaacgagaaacttactccatcacataatcttcaaacaatattcatctttttggtttgtcatcggattatctgctcggaaaactgagcttattgaataattaccgatttggttcatagatctttttgcagtccatcagaatgtggactgtatggtattagattaacatgagaatcctaatattgcaagctgaattatttttgaaatcagaacagtattttattacctgtatctaaatttttgtttccgtgacagacccatacacgttgatttcttaagtgttactaatctcatgagctgtcaccagattaatcaactttccatcatccttgctgctgtcaacaatcagaacttctgatccatatgtattctgtttttaaagctgtgaccacttcgtgctcatagccttatcttataagagcagtatgctcccataagataaaactacgagattgtgccgttcttctgctcagaaaatgcttttttcagataagctgcgcagtcaggaagggaaaactgccgattttatcgtgcagtttcctccgctgacaattcgccgcttcacactcccatcttcttcatcactttattgccaaaaacaatctgatggcagtatttcataatcccctatgtccaattccaattctttaaccgctttttctgcagcattatagtcttccgaactgtgataataaaatttccactttgcattttttgaaatacagtatttcaaatatgtaaaatagggcatatttacttctccgaaagaatgtccaataatttcaacattattaacttccgttagttgccgaaaaaaaaatcctctgaaggacatacattcatttgtattcttaaaagttcgctcataatagtttgcaactgcattgtatatactttcttttccttcgtcatattcttcagcagccctttcagctttctcacgatattcttttattttcttcacatttccatgtcccagaattggaggttcatcacaatatggatataatccgccatgaatatgtaatatatggttagacggtacacgatatatacgttccaatacgctggtataattaaatgtaaaaaaataatcctcagagttatcaataaaagtagccttcattggcgctgctttgaataaacgtacctgcctaatccatttgcctacatattcattaagtccctcaataaatctatattgttcttcccaataatcatccattgtgtcttttattccaactggatctccatctaagtccaaatcatctactattgatttagaaaagtccaacatctctgcttcattcgcttcgccaagtccatattcaaaatttttccacagtgttttatatatagcgtcatcccggcgattttgaatgtttttattctttttaaatcgcttatccagcctttcaaaaggcgcaatactatacatattctccatctgtacgagaaaatcttctgcatatttttcgagatactttctaaaatcccaatacgatgtcttcaacccatatcttcttttatattggggtaatcatactgagccagcaaactaagtaatccttcttgatcttttaccgcataattatataatatatagatttcattgatagacattcttaaaagcctctgaaatcctactgtcctgtcatcgctcagagccaacaccatttcttccgaaagcatttcgctgctactcttagcaaatacaaagccttcatcatcgactggggattgcatttcattctgagtaactgtatcctgtacatcagttactttctgctctggatatacactactataatagcttgttccacccatgattgccacagcacaaataattactacaatcacgtacttaaactttattgtaacgtcaagacctacaaaagcaccttcttccttctggaaagaaatgcttttaccatccatcaatgcaccagcagatacatcaatctcattgccgcattcacagacacaatgccagtacacagaacctctatggtctctgcgttctgtcggatacatggcagtaagtagtccaaacttctgtccacttagatctctgggtcttcttcccatactcattcctatccttattctgtttttgaatttcgtagagtatacaactctacgaattcctttatagttaatttacggtttaaaaagactttaatcagtgatatcttactctcattatacgttcaagtcaaggaagaaatgtcgaaatttgtgcattcttatcaataatacgcgaaaatttaatcgttttcatcacacagcactgcttattttttgtgattattgacttatttaccgtcaaaaaaatggtcaaaatggaggagaaaaatatgccacgaagaggagaaaatatttacaaaaggaaggacggtcgctgggaagccagatacatttattcattcaaagaagatggtagtcccagataccgttctatctatgcagcagattatttaactgttaagaaaaagcaaaatgatgcaaaaagaaaaatggatccacgtctttttcaaagtgttcgtatgaagaagaacatttccttttacggactgctctggctggaacggatgaagccttcctgcaaggaatctacttatgtaaggtatcattatcttttcagccactatatcagtcctatgattggtgatcgccttgtctatacgttcagtaataaagattgtgaagtatttctgaacagattattggtttcagggaaaagtgatggttccggattggctccgaaaacagttaccgatatccgttctgttgtcaaattaattttaaaaactgctgaaaaggaaggggaactgtctctttgcaacccggaactctgttcagtcaagtccgtcaggaaaccgcttcggatcctctctctaaaggaacagcaggccttgcaggactatttattagggaatctgacacataaaaatatcgggacgctgattgcactatatacaggagtacgtcttggggaactttgtgcaatgcagtggaaggatattcattttcaggaacaatatctggagatatctaagactttacacagagttaaggatcacacagatgattccgaacataatacaaaaatcattatcactccaccaaaaacagaaagctccatccgtatcattccgattccagatttcctgtttgagatcttgcagcaatacgtccaatctcacacgataaatcccgaagcatatatcctcactggaaagaagaagagttttcgcgagccgcggtcgatcgaatattatttcaaaaaaactttgaaaaaatgtcagatcgaaccacttcattttcattgtctgcgacatacttttgcaacccgttgcgtagaacttggattcgatatgaagacgttaagtgagattttaggacactccaatattaacacaactctaaaccggtatgtacatccttctatggagcagaaacagcaaaacatggataagctaaacgctgtatttaccgtcaaataattggtcatatcttttaaaaaccccataaattcaacttaatttcatttttttcgtagagttgtatactctacgaaatatttttatccaaaacttcccttatatataaaaagagccttaatatcttccacaataccactgtatcgttcagatattaaagctctttttatttcttttatttttcttttcttataccacagcttctatgatcgttttagaatccacatctacctgctgcactccgatttctttcttctgataaaagcatgcggacagctcatatcaatattaaactctgctgcacattttcctacttaagattctaccattgcaccttataaaagacaagtttgttattttctgtcttgttctgtaaaaaatacattttatcgtccactctccgccctgccctccttgaattttctcctgaaaaatggtataacgttaaatgtataatgattaatctgttaattctaattaatcaattcgcgttactgtctgatttcttaagacggttaaaaattaattcacactgaggagaagaaaatgacgaacatcgaaatgttagaaaacacactcccgattgcacctctgaaactgattgctatggagagctgcaaacctctgggacagaaggtaaatgattatattgtttccttccgtgagaacacgatcaacgaagtaacagaatccccactttacagaaactataaggtcaacaattaccaggtagactgtagttgtccgagattcggttccggtgaagctaagggtatcctgaaagagacaatccgtggtactgatctttttatcatgactgatgtatgcaactacagcctgacttacacagtaaacggacatcttaaccatatgtctccggatgaccattatcaggatctgaagagaattatcgctgctgcaacaggtaaggctcgccgtatcaatgttatcatgcctttcctttacgaaagcagacagcacaagcgtacaagaagagagtctcttgactgtgctcttgcactggaagaactggacgcaatgggcgtttccaacatcattacatttgatgctcatgacccgcgtgtacagaatgcgattccacttagtggatttgacagctttaacccacagtatcagttcttaaaagcactgttccgtgaagtaccggatctgaaagctgacaaagaacatctgatgatcatcagcccggatgaaggagctatgcaccgtgcagtttacttctctaatgtacttggtgttgatatgggtatgttctacaaacgccgtgactactctacagttgtaaacggaaagaacccgatcgttgcccatgaattcctcggtgatgatgtgacaggaaaggatgttcttatcgttgacgatatgatctcttccggagaaagtatgcttgatgttgcaaaacagctgaaagatcgtaaggccggacgtgtctttgtatgtacaacattcggactgttcacagacggatttgataaattcgatgagtattacaataagggatatatcagtaaagttattacaacaaaccttacatatctcccaccggaactttatgagaaaccttacttcgtaaaagctgatatgagtaaatttatcgcactgatcattgattccctgaaccatgatgtgccgatcagctctgttatcagcccgacagataagattcatgctcttcttgagaagcgtgaaaaaggacttctgtaaaaatccataaaaatacctgcaagatgtcaaaattgatatctgcaggtatttttttaatacttaaattattttatttcatctccgcaacgcggtcctgaatcgtcttattgaaattctcaatctgtctggaataaggctcattcatgaacttgctattcagcatgaagtctgctgttgcaaggttgttcgcaaccggaatatcatatactactgcgattctaagaagtgccttaacgtccgggtcatgtggctgtgcctctaacggatcccacaaaaagatcatgaaatcaatctgtccttctacaatcttcgcaccgatctgctggtctccaccaagtggaccactgcagtatccttttaccggaagtcctgttttctctgcgatcagacgggctgttgttcctgttccgcataggaaatgtccctgtaatacttctttatttctatcacaccattcaatcagttctttcttctttccatcatgggctacgagtgcaatgtgttttgcttttccaatttccattgttacaaaattatctgtaagcattttcgtgtcctccttcaagtcttcctgttgttgatttttatattcttcaacagttttttctctgatgtctattatattttcttttccctgttacttcaacctgttttgttgattcttaacagaatttttacggttaccattcacaaatttttactcttccgtatttcgatgttcttcatcatagaatttcatcaacgcctgtgttccgagatctccgtatccttcctgctcaagttcttcgtaattggcaagaaccatactgagtacatcaagggaaagtccttttctgttcgcttcgatcagtgcaagcttcatatctttgatgaagtgtttcataaagaatcccggtgcataatcatcttttaagatctttggtccgaatgtgtcaagctgcttgcttcctgctgcccctgtcgcaacggacttcatgaatacttccggatccagtccctgttcttttgcataagtaagtgcctcgcacacaccggacagtgttccggcgatcatgatctggttcgccagcttgcagtgctgtccgcatccagccttaccctgataattaatgtttgttcccattgcctcaaagagtgacatacaggcttcgtaatcttccttttctccaccaacgagaatggataatgttccggctttcgctcctgtatctccgcctgtgacaggtgcatccatcacatggaaacctcgttttgtaccttcctcgtaaatcttctcagcaatctgcggacttgttgttgtcatatcgatcagataagcacctttctttgcactgtctaagatattcccctcatcaaagtatacttcttctacatcctgtgggaacccaacgatcgtaataactgcatcacaatcctgcacgcaatccttgattgactcatggaactgtgctccttcgctgatcacatcttctactttactctttgttcttgcatagatatgtaattcaaatccggctttcatgagatttctgaccatggattttcccatgattcctacaccgataaaacccactttattcatctgctttattcctcctgtctaagatagctcccatgttatcacacaggagccattcttatcattttctattttcaactatctttcttcttttgtcacaacttcgccctgttttttgtaaatgctgtttgccggaacgaatccacgtacagaagaaagtggatagatgttgctgtgatttccaacaactgttcccggattcagaacgcttccgcatcctacttctacttcatctccgagcattgcgccgaacttcttcatgcctgtctcaatcttctcttctccggcttttaccacaacaagtttcttatctgattttacgttagatgtaattgatccggctcccatatgagatttgtatccaagaacagaatcacctacataattatagtgcggaacctgaactttattaaaaaggatcacgttcttaagctctgtggaatttcctacaacagctccttctcctacgatcgcatttccacggataaatgcacagtgacgaacctcagcatcctttccgatgattgccggtccattgataaatgcagtcggagcaacctttgcagacttcgctacccatacattttctccgcgtttctcgtattcatcctcgctcaatgtagctccaagttcaaggatgaagttgctgatcttcggaagtacttcccacggataagtaactccgttgaagatatcttttgcgattgtctggtctaatgaataattttcttttactgttaatgcttctaacatggtaattcctttctgccggttagaaccgacttacatttatgtcttattattgtgtcatttacttctgctgcctgtttttgttctgcctgtcgtattattattattatttacagacggatagaatcctgctgctttttcatagcaggctctgagttgatattgattgttcagtcctttcaccccaacggttctgctggtgatgaaatgatcgagttttctcatatattcatctgatgtgatggaaccttctgccacatagttcagccccttctcccagcttgctgtaagttccgggttcaggagtgaccggatggaatgatcaacaacatcatagatcatctctccctgcagcgtcggtgtgatcacctgtgtcttcttgttcaatgcgagatacttgatattcacaagctttttcagaatctctgctcttgtcgcacttgttccgattccgcttcctttgatctgggcacgaagttcttcgtcctcgatcagctgtcctgcattctccattgccaggatcatggaaccggaattgtaacgcttcggaggtgatgtctctccttctttgatatccaatgctctgacctgaaggactgcacccttctttaatgacttgaccacttcgaacaatccggtgtccaggctttgatcggaagaatcggaacctgcctcgtcatttgtatcattgttattattctcactgtttccattactgctatcttttgtggctgtctgagaagctttcttcttcggaatgcctgccactttcagataaccttcctcagcaagtactttgaagcttgagaagaaactttcttctttgatcttcgtcacgatagcaaccttctggtaaactgccggcggataaaagatactcaggaatcttcgcacgatcaggtcgtacacacccttcgcagtagatgaaacagtactcaatgcattcaacccttgtcctgtaggaatgattgcataatggtctgtaatctgcttgtcattcacatagcgtgtctttgcaagtgtcttatagcttccgaaattcaggatatcctgcatatacggtgccgccatcggatactttgacagcccgttcagatttcttgtaatttcctttgccactgcggtagacagaacacgggcatcggttctcggataagtcacaagttttttctcatacagctcctgcacgattcgcagtgtctcatccggactgatcttaaatctcttagaacagtcgttctgaagctccgccaggttatataaaagagggggattcttcttctctttctttttctcaatcgactcgatcctgcagttcaatcctgcctgtccctgtattcctgctacatttacagactcgtcatccggtgtctgcaggtattgaatcaattcttctgctttcttgcgctccttgaatccattttccttataaaggtcataggactcaaaatagcgggagcctttcactgctctccactcaccctcgaacgtatgtccctgtgcatcgatcgtgctaagtacgcggtaaaacggtgtcttgacgaaatcacggatctcgcgttctctgcgcacaaccatgccaagaacacacgtcataacacgtcctacagatacaacggaatacttcgtttgcagaaaatttgaaatactattgccatatttcaaagtcagcagacgggaaaagttgattcccatcagataatcttctttggcgcgcaggtatgcagatgctccgaggttatcatactctgacagatctttggcttcacggattcctcgtaagatttcttcttctgtctgggaatcgatccacactctccgtcgcttttttccctcaacgtgtgcttcctgttctacgagacgatagatatattctccctctcgcccggagtcggtacagacatagatcgtatcgacatcttcccggttcaggatcccactgacgatctggaactgctttgccactgacggaatgacttcgtatttgaattcttccgggataaatggcagtgtctgcaggttccatctcttaagtgccggatcatattcctccggatagctcatcgtcaccagatggccgacgcaccaggtgacaatggcttcgtctgactcaagatatccgtcccgtcttttcgtatttagtttcaatgcttttgcgaattcctgggcaacgctcggtttctccgcaatgtatactgattttcccataaattaattatttatcttccattcaattattttacacgaaatctgtaggcagtacgagtatcatatttctcgcctttcttacagatcggtcccgggaagttttcatggtggattgcatccggatagtactgtgtctccagacagattgcatctctcatctcataaaccgctccatctcttcctttcactccgtcaaggaagttcgcagtatagatctgcacacccggaagatctgtcagtacgctcatatggattccactttcatccccggccacttctgctactttatcaaattcgccttcatttttcaatacccagttgtggtcataaccttttccgaataccagcggttcataatctgcttcaatgtcttttccgattgtcttatctattctgaaatccatcggagttccttccacactgcggatctcacctgtcggaatggatgctgcgtctgccggtgtaaatgcatccgcattcagccataatgtgtgattcagaacatctccgctcttatgtccgttcaggttaaagtaactgtgatttgtcatattgatgatcgtatcctgatccggttctgcttcgtagtggattatcaaagtattctcttcatccagggaatacgtcactttcataacaagtgctcccggatatccctgatctccatccgggctgtccatctcaaatgttacatgggtatcatctgcgtccgcaaccttccacaatcttccgtgatagaaatcaagtccgctgtgtaagttattctctccgtcattctttgtcaggtgatattctgttccattgatctcgatcactgccccaccgatacgatttgcgttacgtccaacagatgctccgaatgcatttccaagtccggcttcatatccggttgcatcatcatatccaagtgtcacttctaccggattgttatccttatccggaacaagtacgcttgtcagtgttgctccgaagtcggatacactgatctgcattccggcttcattttccagtgtatatacggtagccaattcccctttcgatgtctttccaaagtcttttttctgtaacggtttcatctttctctgctcctccatctctcgtccttctattgtttttttctgaaaatcttcagtacggttgttaagaatccttcttttttcttcttcggcacattggctgcagccggacgttgtgcctgtgatgcttctctcataaaggtctcctgtgcattcacaagacttgctccgtcttccaccggtttcttcacatatgttccgtcacttgtcatcgcgcgagctttcacattgtcagaaagcattacatgaagctgatggaacaggcgtttccggatctctacatcatagaccgggcacgcgacttctacacgcttctctgtatttcttgtcatcatatcagcagatccaatataaactgttgcatctgctccttttccgaagacgaaaagtcttggatgctccagatatcttccgacgatacttgtcacacgcagattctctgtctttcccttgattcccgggaggatacagcagatcccacgcacgatcagatctatcttcacccctgcctgagatgcttctgttacttttcgaatgaaatccatgtccgtaacagaattcattttcataatgattcttccgttctcaccttttgcaatttcttcatccatcaaggcaagtactttctgtttcaggcttgtcggtgaaacaatcagatgcttgtaaactccattcagattgctgatcgacatattctggaaaaagactgctgcgtcttcaccaatctcttgtctgcttgtcatcagcgagtaatcggtatacatcttcgctgtcttttcgttataatttccggttccaatctgtgtaatgtaatgaattccggtacggtttctgtatgtgatcaggcagatcttggagtgtaccttataaccctcgaatccgtacagaacacggcatccggcctcttccagacgctcggaccagtcaatgttgttctgctcatcaaaacgtgctctcagctcgatcagaaccgtaacctcttttccattctcagccgctgcgcagagatattctacaagtcgtgctttctttgccagacggtagattgtgatcttgattgtcagaacttccgggtctgttgatgcttctttgatcagctgaaggaacggttccatgctttcgtatggatagcaaaggagtacgtctttcttctttatctgcggaatcaccttaccctctgcaagcatggaagacggttgcggagaaaatggtacatccacgagcgtttttttcttcgaatccggaagtttatcagcgattgcaaagataaagtccagcttcatcggcatctttgttcggaaaatacattccggacggatattgaatttctcacagaaatatttctccatctctttactcagagaattggctgcctcaagacggacaacagccatccttcttctcttatgaagtgtctcctgcatcacatgacggaaatctccgctatctgcataagcttcatcatccggtgatacatctgcatttctcgttacacggatatagttcttgtctgagatctgatactggtcaaaaacaagatcaataaattccaggataatcttttccatacggatataacggatgtcataccccggaagatagagaatattagaaatatattgtggtaccgggatgattccgagcatcgtcttgtctccctgcttcagattcgcaaccacatacagttctttacttaacagatgtgggaacggatggttcgcatctacgatctgtggggaaagcaccggcattacttcttctttgaaatatttctttacaaacttcttctcctgctgttccagttccttgaagtcaagaccgcagacaccatacggacttaactgtttcttgatctctgcatatgtcttatcccgttccttgtaaagtggggaaacagctcgataaattgcatctaactgctgttttgctgtcataccggatcgctgatcgatctttttgctgtctgctgatgccatatcatacagacttcctacgcggatcataaaaaactcgtctaagttacttgtgaaaatagctacgaatttcatacgttccatcaaaggaactgtctcgtcccgtgcttcttcgagaacgcgctgattgaaccgaagccacgataattcacggttctgagtttcttctaaaatctctctcatataactcaactcccttttctctcttcttttaacaagtcgatttatttttattactgttcaagatacttcagcatttcttctgtctttcgctccatcagatgatatccatgctcataaaatgcatgcaggacatccggatgctgttcgagccgtgatactggttttacatgtggacgaaggacataaatctctccacgcttctcaagctggtccagataattcatcgtcttattatagataaaacttcttctgaagattgtccggactgcattcggataggacttatatgcctgtctgtaaagcttctgcactgccggtgagatcactttcttacgatagccctgatttctcgtcaggatcactatgatcttctcattcccaagcttctgtgcacgacggatcggaacagaatctgcaagtccgccatccagatacgggacaccgtcaatattcaccatcggagtcacaagcggcatactgcttgatgcacgacagatcttcatcaatcggtcaggatcttctgtttccgtcatatattctgcatttccagtcagacagtttgtcgttaccagctcacagtgcatctctgactgaaaatatgcatcaaaatcaaatgggatcagttcattcggatatttatcaaaaatcaaatccatattcatcagacttttctccctgatcgtatctttcactccattaatatacttcatatcttttgtattcggaatcatacagtctcttgtacgtcccggctgtctggaaacataatctactgcattacatgcgccggcagacacaccgatcacatctgaaaaataaatatcctgttccataaggtaatccagagcaccagaagtaaatatgcctcttgttgctccaccttccagtacgattgttgctttcttaagtgccatggtttctcctcttttctactgctatttatattgtgagattcttagtaacattataactttttacaatggaaagaacaaggattagttcttatacattttcacacagtttgccctgctttttcgtatgcttttttctatttcagtacttgtcagcaccctttcttctatgttaatatatggattggtatgttcttattcacacgtatttgaaaaaggacaattataacaacgtaatcacaattctaatttatttacaaggagactttcaaatgattagtgcaaataacgtaacccttcgcgtcgggaaaaaggcgctgttcgaagatgttaacatcaaattcacagaggggaactgctacggaatgatcggtgcgaatggtgccggtaaatctacatttcttaagattctctccggacagcttgagccgacatccggtgatgtagttatctccccgggcgagagactttctttccttcagcaggatcatttcaaatatgacgaattccctgttcttgatacagttatcatgggaaatgcacgtctgtatgaaatcatgaaagagaaagaagaaatttacgcaaaagaagatttcacagatgaagacggaatcaaagcaagtgagctggaagctgagttcgctacaatggatggatgggaagcagaatctgatgctgccaatcttctgaacggacttggtatcgagacagagcttcattataaactgatgaaagacctgacaggttctgagaaggtcaaggttcttcttgcacaggcactgttcggaaacccggatatcctgcttcttgacgagcctaccaaccacttggatcttgatgcgatcgcatggctggaagaattcctgatcaactttgacaacactgttatcgttgtatcccatgaccgttacttcctgaacaaggtatgtacacagattgccgatatcgattacggcaagatccagctttacgcaggaaactacgacttctggtacgagtcaagccagctgctgatccgtcagatgaaagaggccaacaagaaaaaagaagaaaagatcaaagagctgcaggaatttatttctcgattcagtgcgaacgcttccaagtccaaacaggctacttccagaaagcgtgccctggagaaaatccagcttgatgagatcagaccttccagccgtaaatatccttacatcgacttccgtccgaaccgtgagattggtaatgaagttctctctgtagaaggactttccaagacaattgacggcgagaagattcttgataatcttacattcacacttggccgcgaggataaagttgcttttgttggtggaaatgagtttgctaagacaatcctcttcaagatcctgatcggcgagatggaaccggatgagggaacatataaatggggagttacaacttctcaggcttacttcccgaaggatttcggcggagaattcgacaatgactacaatatcacagagtggctgacacagtactctgaggaaaaggatgtaacttatgttcgtggattccttggaagaatgctcttctccggtgaagacggagtgaagaaagttgctgtactttccggtggtgagaaggttcgctgcctgctctccaagatgatgatctcaggagcaaatgtactgcttcttgatgagccaacaaaccacctggatatggagtctatcacagcactcaacaatggtctgatcaagttccctggagtacttctctttacttccagagaccaccagatcgtacagacaacagcgaaccgtatcatggagattgttccgggcggtaagctgatcgataagatcacaacttatgatgaatatcttgagagcgatgagatggcaagaaagagacagacttactctgtacagacagatgatgaggattaagatataattaagagccagaacagacaccgtgtgttgtgcctgtcctggctctttctaatatttatcaattattcactccatggtgcgctgccacactatcaacggtcagtcctttgaatgtgtatccctgacttctatagtaatcaataatctgtggcaatgcctgtacagttgtatcttttgcatctgtatcatgcatcagaatatcaacatgatttgccgtgcaggatgttgcgttggaaaccagcttttctaccggaacattatttccgcttgcgtcagtagaatcacagttccagtcaaaatactgatatccttggtctctcactgctttcgtaagtgttgtcatcaatcctttgacatattttgcactgacggtgttgctggatcctcccggaaaacgaatgatcatggatttcattcctgtgatactctctaccagatccgatactttctgcagatctgcgaagtatgcatcttcggatgcgtaaactgttgcataatcgtgtgtataggtatgaagtccgatcgaatgtccttcggaaaaggctctttttatcatatcatcatgttcctgattatttcctgtgacgaagaaggttgccttcgcatttttctctttcaggatatcaagaatctctccggtattctctgaaggaccatcatcaaaagtcagataaacaactttctcattccaatccggattctctttcactttgatctttcgctcaatctttgtctcgtttccggaacggtcttttgcaagataggtaacaatataggttcccggtgttgcaaaatccactttgtcagcaccctgtacttccaatgttggctctggatccatatcatcctttatcgtaaccccttcattaaagtccatcgtatcgccctgtgcaagttctttatcatctgctccttcaatagtcggtcctgttgtatcctcttccagattcagtgttgatttaccttctgttttatgaccgtcactatctgttgcagcaacagttactccgtattttcctttcttctcccaggaatcctgtccgacaaattcaagtgtgacatctgatgcatcttttactgattctacaaaatcttccggcttgatatctttcggaagttctgttgtataactgtctttcattttaagctcaggtgcttttgtatccttaacttcgacttccgcttttactttttgtttaccgtagacatagtaaaccgtatattttccttctttattcgtatctactttcccttctgtcttcacatctttcgcttttccaccaacaacgaaacggatgttggacattagatccatactttctttcttttcctgcgcgatcactttactccgtaatacaatcggattcattttaaaataagtaaatgttgaaactgccggaactaatacaacgaacagaatcaatatgattgcaattctccttcgtctcttgatgcgtcgaatgcgttgttcattcctcttgcgtctctcccactcttttctaatggaatctgtgctttttcccatcgcgctataatgttcataaaacgcttgttctttcttgcgttctttttcttcttttgtttctctagaccacatgcttatcccttttttcttttctattcttaaaatcaggggacaatcaaaattgtcccctgactttttcttccatattaatcatagcattccttttttgcagaaacaaggggactttaacaatcctaatgatttattaagaatcttaaagattgttctttagaattcttcatctttccagtgtttcagacgctttactgcatctggattctgtttctcaagtcttcgttccagccgctctcttcgctcttcaatatgctcaacaatctctggatgctctttcagaagacgatctctaagttttcttcttctacgctcgattaattcaatgacgagttttttgttttcttttacatcacttggaagatcatctaagtgaagttccattctgcggagcaactcatcttcatcaagtgctccaagtgaattccaaaattccagtttttctttgattccttcttcggaaagtttctcgagatctgtaatctcatggatctgcttcacaatagaaagcactcgtttctcaatttctttgactgcatcatcaccaaatgcccatgcaaactcttccagtgtattttcttcttctgcaggaagggaaaaatattctcttcgcttaagtttttcgagatcttcttctggaatatccaatgggcaaggctgctcaatccccgcatcatgaagtgccgcaagaattgttcttcgcacagcaccttcttttatcaaatgtccgattccaagctttctcatctgatcgttaacttctctggaatgttctgtgatatagaacttaattccacgttttttcagacttgctgcaagcatttcgagtgcatctgccgctgtaatatccaggctgttgattgctgatgcgtccagaattacgacctttgtatcctctttgatgctgttttcaatatctgaaaccagcactttgttatttgcaaagaaaaggttctcgctaaatctgtaaataatcacatgcttgattggatatgcaaaacggtttctctccagatcataataaacttcttttcccggaatcattccacggaaagatctcggagggtttgtagcccttaaaatcactgctacaaaagataacaaaattccgatcacaactccgtaaatcgtaccaaggaacagcacaccgatccctgctgcaataaaaatatagaattcgtttctgcttactttaaataagcgtactgcaagatgtgtctctacaacattcatcagtgcagagattacgattgccgtcaataccggaaccggaagatattcgataaatccggttgcacctataagtacaactgccatagtcagtcccgctgtaatggatacaacctgtgtctttcctccatactgttcattcatggaagtcctggaaatacttccatttaccgggcagcatccaactgcaccggcagcaagatttcctgcggcacaggcaaggatttcctgacggtcatccagttcatatccgtttttggatgcaaaattgttctctgacaaaagtgtctctgccatgatcacaacagcaaccataagtgctcttcccacagcctgggtaagattgatccctgtaaaatccgggaaaataagccgcggaagccctggttgaactgcctgcaggagaactacgccatactggtttacatgaaagacaattgtcgagagaactccggcaatcataataacgattgccatcgggaactttggaatcagttttttggatacaatcaagattacaagtgctccaattcccattccaaaggacaaccagtttatctttgtgattgcctgaaaaatgtgttctgcaagttctatgaattctccagtccccgccgggcttcccatcagtttcggaatctgcatcataataattgtcactgcaataccactgataaatccgcccataaccggtgtcgagataaaatcaacaatcttatctgcatgtaaaagataaaacaacaataaccagagtcctgtaaacaatgcgatcaatggtacatactgcaatgcctgggctgattctgccgtcactccaagtgttgccagtgcagctccgacaattgccgccggtgccgcatctactccgaagataaactgttttgaagttgagagcatggcgaatagcaggatcggcagaacagatccataaagtccatacaccgccggaacacctgcgatctgtgcataccccatagagattgggattgaaaccgctgccatgataattccgcttaaaatatcttttggcaaatattcttttttataattttttaatgttgaaaatatttttacagacacttttatgtcacttctttcttttacttcttttttgctgttaattctctacgcttccaaatggtccgatgtccagaggattctggttctgaactgcgtctgtcccctcagcatcttctgatataccgtaaccttttttatcacctgctgtcacttcttgaatcttatcaagaaaaactgctccgtactgttcatatttcttaaatcccataccgtgtacttcaagcagttcctctttttcaaatggaacaagtacacacatctcatgtaatgtacgatctgaagcgaccatatatggcggaattccttttttctttgccaaagaataacgcacagaacgtaattcttcgaataattctcggcttttatctgtaagattcctgaaactctctccctttctatgagacgctttctttccacttccggactttttcttttctgtaagttctgacttcttgcagcgaagtttcaattctctcgatttcagtaattcttctgaccggtctgtcagtttcaggatcgcataacgatctgcgctctgttgaaggtatccgtgttcgagcagtgtataaactacgtctttcagcctctgctgagaacatttactctgtcttccataaatggaaagttcattcatccctgcacttctgatcttcactgtattcgctcccgccagtgtggaaaggatcattgtcataccgtatctctgtctggattcgcgcacacactcaatcacgtctgccgcaatctctccgacatcaagctctacgaattcttccagacaattggaacaattcccacaatgttcttctgtctcttgtccaaaataattcaatatgtattttctaagacacatgcttatcgtacaataattactcatcttacgtaaccggagaacatcctgttcccggatcacccggagttcttcttctgtgtattctccaatctgctctttactatccagcaggagctgattgatcatgatatcctgcggtgaatagaaaaggatacattctgccggttctccgtctcgtccggctctgcctgcctcctggtaataattttccatgctctgcggcatattataatgaagtacaaaacggacattggacttatctattcccattccaaatgcattcgttgcgatcataatctctatcctgtcataaatgaaatcttcctgactttcatttcttgcctctgtccccattcctgcgtgatatcttccgacagaaaatccagcattctgcaattccaaatagagttcatctacattttttcttgttgcacagtaaataattccactgtcttctctgtgctgtgtaagatattccttaattgcatccttcttcccacgcgctggtcttacttcgaagtaaaggttctctctgtcaaaaccggatacatttatataaggagattcaagatcaagtacttcaagaatatcttctcttactttctgtgttgctgttgctgtaaatgcactgacgaccgggcgtcttggaagctggcggatgaattctgtgatcttcacataacttgggcgaaaatcctgtccccactgggaaatacagtgagcctcatcgattgtcaccatagaaagttctgtatgacatgcaaagtccagaaaccgtggtgtcaacaagcgttccggagcgacatagatcatcttatatctgcctgccgctgccagttctaatgcttttgtaatctgccgctctgtcagtgcactgttaatatacgctgcatgaactcctgcttcattcagtgccttcacctgatcgatcatcaatgaaatcagcggtgatactacgatcgtgatcccagacatcagaagtgccggaacctgataacaaagtgactttcccgctccagtcggcatgattgccaacacatctcttccattcaaaatctgatctacaatctcctcctgtcctttacggaaagaatcgtatccaaaaatttcttttaatatctgtgtttttctactgttgctttccatctactgctgcctttcacctgttgttaactttcacttctaaaatccaaacattgcattcagtctttccagtctttcttcaaattccggataaaactgtgcttcttcctctgcctgataaggcatttgataaaagttgcggagaaccacaaccgtcagtactttcgcgttctgctcatcaagttctttcattccttcttcacagttcttaagaaatgtatgccatctccacacgaaatcttcgtatctcttctgatctgcaattccaagccacttcttaatcttcactttaccacgttcctgcttcttacactcatgcacctggataaaatacttgaatccattctcctcataaatacgtccaagagggaacaaacggcagattcccggtctatatccatgaatagagcatcttccatctttcaagaacagacaggcttcttcctctcctgccatctttaaattaggaagtaccatcccgtcaactacattcaattccagatagtttgcaaacagtgtatcaaaattctctttttttccgagttgcaatctccacagatccattggatccaatatgatggaatttcccattccctggcagcatgcagagcagccttcacaatcatgacagtccaccttaaccatatctccggaggaatacagacgtccgtctgaaatttcattaagatctacttcgcgcttcatttttctatctccaatttcttctgaatttaatcgtgttctattagtataatacagatggactgttggttgcaagagctgtgttgctgttcgcggttggtcaacataatttacaaatgatacaaaaaagttgttgatggcacaggaaaccgcactatcatcgttcgcccctgctcatcaacaactttttatttcacattataaatgattaatcaaacttaatcctcatatccgtttggattcatgctctgccatctccaggaatcttcacacatcttgttcagatctctctcagctacccagtgcagttcttcctttgccttggaagcatcacagtaacatgtagcaatgtctcctgcacgacgtggtttaatctgataaggaatctcttttccacaagctttggaaaatgctttcaccatgtcaagtacggaatatccgtttcctgttccaagattatatacggaaactcctgctttctctttcagtttttctactgcgcggacatgtcccactgcgagatcaactacgtggatgtaatcgcggacacctgttccgtcaggtgtatcataatcatctccaaacacaccgagacactcaagtttaccgattgcaacctgtgtaatgtatggaatcaagttattcgggattcccttcggatcttctccgatcagtccgctctcatgagctccgattggattgaagtaacgaagaagtacgacgttccactccggatctgctgtatgaagatctgtcaggatctgctccagcatccattttgtccatccgtatgggtttgtacatgttccctttgggcactcttctgtgatcgggataaatgccggatcaccatatactgttgcagaagaactgaagatgatattcttcacgccgtgatttctcattacatcacagagaactaaagttcctgcaatgttattctcgtagtattcgagtggtttaacaactgattcacctactgccttgagtcctgcgaaatgaataaccgactcgatctcttctttctcaaagatctcgttcattgcttctttgtcgcggatgtctgctttatagaacttaagatcttttcctgtgatctgctttactctgtctactgccttctcagatgcattgtaaaggttatctgcgattacaacatcatatcctgcatttaaaagttctacacacgtgtggcttccgataaatccggcgcctcctgttactaaaattgccattttaaaattcctcctctgagctttattgctcaaattgctgctcctcacagtaactgtgttcagcagcttgcttatctttgctttgttgtctttgattataacacatccaccacaaaaatctttatacgaatagttcctcttatggtaaaaatgttgcataatcattatgattcacaaattctgtaactgacaacacataatctaatcccacaatttctgtggataaagaccttcatctttcaaagcctgtaccgctgcaactacaaccggcttgtcctctttgtatgtaactccataccatttatcttcggattcaagcactcttacggttgctctgccctctgccagaaggtcactgactacggatggcaagaagtactcacatttcattggattctccttaatacctttctcaaggaatgccgggaatcctgctttgatctcatctaaaatacttcttgtgaatccccacatattcatggatacaagagtatctccgtcgatagttgtccacgtctctccgtcgtcttctgagaaagcgattccaccgtcacgcttctcgatctttgtacgctctgtgattccaaccagctctttcgcctcattgagttcacatacgccacgagcaacatgtccgttatctgtaactgtattcttcagacgataacctaccattgtataacggtacttatcatcatcttcatgtgttgtaaggaattcatagattgtctcaaatgcatgacgtccgtaataatcgtccgcgttgattactgcaaatggtccatccacctcatcgatcgcacttaaaacagcatgtgctgttccccaaggctttacacgtccttctggaacttcataaccttccgggagattgttcagatcctggaatacatacgctacatccatgatcttctcaattctctttccaacagcctctttaaaatctgcttcattttctttcttaataataaatacgactttctcaaatcctgcgcgttttgcatcaaagatcgagaaatccataataatatgtccttcctgatctaccgggtcaatctgcttcagcccgccatatctgcttcccattcctgctgccataatgaccagaaccggtttcttcataatgaaatcctccaaatatttttaaatattatgttgcctgatggcaattacatttctattgtatgacatatagataaaaaaatctagatgaaaatcaaagaaatatatacacaaaaatccatgcatttcatcccactgagatcataaaatgcatggattttcctgactgtcaggttattttactgatgttatttcacattaaatgcgtcattccccggatatactgcgcttgttccaagttcttcttcgatgcggagtaactgattatatttcgctacacgctccgaacggctcggcgctccggtcttgatctggcaggtattcagtgctactgcaagatctgcaatcgttgtgtcctctgtctcaccggaacggtgggaagaaattgctgtgtaacctgctttgtgtgccatcttgattgcttcaagagtctcagatacagatccaatctgattcagtttgatcagaatagaatttccgcatccaagcttaattcctttcgccagtctctctgtgtttgtgacaaaaagatcatctccaaccagctggactttatctcccagctctgctgtcagctttttccagccttcccagtcttcctcatcaagtgcatcttcgattgagatgatcggatatttctctaccagtttcttccagtggtcaatgagctgttctgaagtatagactgttcctgcctttggaagtttatactctccaatcgtccctgtcttccattctgaagatgccgcatccatcgcgatcttgaagtcttttccaggctcatatccggccttcttcacagcctcaagaattgtctcgattgcttcttcgtctgatttcagtgccggggcaaatccaccctcatcacctacagatgttgcaagtcctctgtctttcaagattcctgcaagtgcatggaatacctctgtacaccagcggatgcattctttaaaagacggtgctccaaccggcatgatcatgaactcctgcacatccagtccggaagaaagtgcatgacacccgccatttacaatgttcatcattggaacaggaagtctgttcccattcactcccccaagaaaacggtacaacggaatctcaagtgcatctgctgccgctcttgcacatgcgattgaaaccgcaagaattgcatttgcgccaagatttgatttatcttttgttccatctgcctggatcattgcctgatcaatcgcataagtatctcctgcatccattccaaccaatgcactgttgattgttgtattaatattttctactgcacgggaaacaccttttccaccgaattttgacttgtctccatctcgaagttcaagcgcctcaaattctcctgtagaagcaccacttggagctgcacctcttgctacagttccatctacaagatgcacttctgcctcaaccgttggatttccgcgtgagtcgataatttctcttccaattactttttcaatttccagataattcatagttgtccatcctttctgaggactccctcgtctgtgttcaggtattacagacaaaggagtatacatgatttattcacacagttagttttctctaaccatatgtattctatcaagtttctttgcaaaacgcaatatttctacatgataatgattctcattttatgggtttctatatattatctgtatttgctattatttatattcttacttttttataaatactccctcagcttctcaaccttctccatatccgttgcccagctagtggcaaatctgactactgtatgcttctcatccgtcttctcccagaagctgaccctgacattcttctcaagttctttcagcttctcgtcttccatctcaacaaagatctggttcgtcggagaatcaatatagaagtcatatcctttttctttcaggatttcttttagtctcgcagctgtttcgatcgcatttttactgattttcatatacagatcatctgtaaataacgtatcaaactgaacaccaaggaaccatcctttggcaagcagtgctccgtgctgtttgatcagtgtcacaaaatgtctcggtgcattttcttttgtaaatacaactgcctctccacagaaggcacctacctttgttccaccaatatagaaaatgtcacagtattctgcaatatcttccattgtcacatctgtatcttctactgcaagaccatatccaagacgtgctccatcgagatacagtggaatatggtactgctgacagatatcagaaagctctgcgagctcgccacgtgtatacagtgtgccatactctgttgggtgagagatgtagaccatccccgggaaaaccatgtgttcatgattcccatcactataaaactgattcaaataatctgccacatctttgggctgaatctttccttccagctgcggaagggtcagtactttatgaccggatgcttcaatcgcacccgcctcgtgtgatgcaacatgacctgtctcagccgcgataacgccttcatagctctggagcacggaatcaattactgtctgatttgtctgtgttcctcccacaaggaagtaaatgtctgcctccgggcatttacatgcctgacggattttttcctttgcggattcacaatatgaatcatttccgtatcctgtaattccttctttatttacttctgccagtctgcgcaggatttcctcatgtgcgccttctgaatagtcattttcaaatgaaatcatttcttagcttttcctttctttctgaatgttgcatttttattcacagttcttttctctggagatttcttgctccttgattcattttttgttgtgatcttcttagcagttcgtttgtcaacggtcttcttttttctcacgctgtatccaaacgttccaatcttttttccaagtccaagatattctccatgggaatatgccagaagacctgtcttattgagttcgaatttgcccttctcatccatataggactcgtccacctgaaccgctttcacttctgcaagaaacatatggtgacttccaagtttctcaatttttgtcactacacattcaatattgaccggtgcttcttcaatgaccggtgcgtaagtaagcttctctgcctttttcgcagttaaatgacactctttccatttatccacatcccggccggagcgcacaccacagtaatcagtcgcataggcgagctgttcggttgtcagattgatcacaaactctccgctctcttcaatcatatgatacgaatatctttccggtcttacggaaatgtataccatcgccggatttgtacatacagttcctgtccatgcaacggtaaaaatgttcgtatttccttctttatctgccgtacttaccataactgccggaagcgggtagaccatattaccggctttccatacctgtttcgccatttctctttcctcctgaaaaccgtcccctgttacggagacggttctgactttctatttgaaaatatcttgggcttcttactgctgcagtgctgatacaagtgccggaacgagctgtttcttacgtgatacgacacctttgagcatcagtttctgtgcattatcttccaaatcataagctccgataatcttttctcttgcttcattaccactgcagatcagttcagaagactctgtaataatatttgtcagcataaagaaaatcatatccagactgtgattttgtcttgtcttttccatctccggaagtactgttgccttaatctcttcaagctcttcttcgctcattgaattcacctgaccaacaccaaataccgtatcattcactgtaaactgtttaaaatcaaggaagagaatctcctcggctgtctttcctttgaggttgcttcctgccttgaacatcgcctgcgcaagtttctctatattgatccctgcaatctctgcaagccttttcgctgtgctttcatcaagtggtgtacaagttggggaacggaacatcaatgtatcggaaatgatcgcggaacaaagaagtcctgcattcaccggatctatttcgacaccattttcctcgtacatctgagatacaattgttgctgtacatccaaccggctgatttctgaaaaatacaggtccgatcgtctcgatactgctcaatctgtggtgatcaataatctcctggacatctgcctcttccactccgtctactgcctggttcttctcattatgatcgacaaggatcacctgtttcttgctaacattgagaagtcttcgtctggaaacaagacctaagaactttccatctttatctacaacagggaagtcgcggaaacgcttgcgtgccatcacttctttcacatcatctacataatcattcttgcggaatgttacgagttgatcctttgtcatgaaagatcttaccggaatactctggctaatatgctgcgctgccgtaaatgtatcatgctgtgtccagataacgacaatttcttttgcctctgcctgacgcagaatatcttctgagatcggatcattctggcagactaccatacagcttgcatccagatcaactgcacactgctgtgcatcaattcgatccccaatgataacaagatcatctttctcgataaagcttgtcatcaactctttgcttgatgctgcaacagttacttttcctttataaaaataaccatgttcatttcctgttacaatttcaccttctactgccgctgcaatattacggtactgtgttcttgccttcgcaagcattgtgttatcatagacttccatataggatttcgcaatatcaccttttgtgatcacaccttccagcacaccattacgtgtgatcggaatcgtatgagtattcatctctgacatcttttcccatgctgtacggattgagaggcttccctgaatttcctgactttcttttaattccacatttttaatctgttctctaagatcagaaagtaataacggaacttttacgccaaagtgttccagtacatattgtgtctcctcgttaagctgccctgcacgacgaggctcatacgtttctccggtaatctttgtcttaagatttgcataagcaattgctgtacaaatagaatctgtatccggattcttatgacctacaacatacacctttttattctcagccatttttctatctctccttctctaatttatctcttatttacttttacactcacatcaatttatctctgtattctgtcatcttacatgaacagcttcttcattaagtattaaacctgacaatttactattcaataagtagagtaacattttttttctattaatccaaccgcatttttcattttcttcacggattttggctcttttgttgtattttttctcatacatatgttatacttttgaataacgagaaaaagaaaatgaggtgcttttaatgagcgaagaaatgaaagaattacagacaaatgaagtaacagaaacaatggcagactatgaagatcatttcgatgatgcgaatccatggaacagagtccaggattatatggataagaaaactgttcttcctgttaaaattgaaggtgttgtcaacggtggcgtaattgtaatggtagaaggacttcgcggattcgttccggcttctaagctgtccctttcctatatcgagaatctggaagattatcttctcaaagatatcgaagtacaggtgattgatgttgaccaggcgaataatcgtcttgtcctttctgcacgtgagcttctgaaggaaaaggaaaaagcagcacgtgatgcacaaattgcaagtatgaaagttggaactgttctgaaaggaactgtagaaacacttcagaactatggagcatttgtaaagttggagaacggactttccggtctggttcacgtttcacagatctcccagaagcgtgtaaaaatgccttctgatgttctcacagttggcgatgaagttgaagtgaaagtcatcggtatcaaagatggcaagatcagccttagcatgaaagctctcgaagaagacaaagagaaggctgaagagaaagctgaaaaggttgtgatcccgaaagcggaagatatcggaacaaaccttggagatctctttaaaaatattcagttatagaaattggtgctgtgatcctgttcagattgataatctgcgtaattggcagcatgatacagaaaaagtccctttcagaagtttatttcttctgaagggacttttctattctcatagtttcaataattcagcaatatttattatgcacaaacattctccagaatctcttctaacgcattcttggaactcgtatgacagcgaatcacatccgcattgcatctgccggcctcttctaccgcacagcgaaccattttatgggatactgtgtttgtgaaaagaacgatcagatcaggacttccaatctgtttgcttaagcttgctgacatctgggtgaagatcttcgccttacaattaaactgtttacagactttcttatactgacataccattctgtcatgtcctccaatgattactacactcatactgaacctcctgaaattaagatctgattatctattgctttacttattactttcctgtatgttttatgaattcatttccacatatcttccttgttcgttagttgtatctaacccatgtatttactatactataacgaaaacgtaatatcaatatcatttactgataatgtttctcattagaataaagaatgtgccttggcaccttcttgcgcctgcggcggtcgcttgcgacacctaccttgtacgccgcagtgcgcatcctgagcggagcgttttttatatgttaggaaagaactttcctaacatataaaaaagaactaccgggacaaacccctacaaaagttaatcccggcagttctttttcttgccttttttattttatgttgtttcactcaagattgctgttcacagtaactactcaagttctgttcttttattttcatccagcagattcttcatacttccaaggcttatcatcaatgtagacgcattgtgcaaaagtgcagatactgtcggctggacaattcctgtcacgccaagcaaaatcagtcctgaattgattccgacgatatttctataattcttatgtatccgcttcatcatggcatttgccagaagtttcagcgtcacaacttcgcgcaggtcatctgccgcaatcgtgatatctgcaatctctcttgcaatctctgcgccgtcactgatcgcaatccccgcatccgctgctgaaagagcaggtgaatcattgatcccatcaccgatcataattacttttcttccttctgctttttctttctcaacgaaattcgctttatcttccggaagaacctcagcataatattcatcaacgccaacgcgtttcgcaattgccgccgctgtacgttcactgtcacctgtcatcataacaactttacggataccggctttcttcagatcacgaaccatttctgttgcctcttcacgaagtgggtcttcaatgcagataactgcaacaagttgtttctcgattgccagatacagatgagagtattctggttttaatgaatcgtatctatcctgatattcggatggaatcgtacatccttcatcttcaaaaatgaaatgactgcttccgatcagaacctttttatcatcaatagaggaagagattccatgtgccacaacatattctacctttgagtgcatttcttcatgagacaaatgcctttctttcgctgcatctacaacggcctttgccatagaatgaggaaaatgttcttccagacatgctgcaatacaaagcagatcattttctgagtattcactgaaagcaacaatctctttcactgtcggcgttgcctttgtcaatgttcctgtcttatcgaaaacgattgtatctgcatcggccacggcctctaagaacttaccaccctttactgtgatattgttctcgcctgcctcacggattgccgaaagtacagtgatcggcatcgcaagcttcaatgcacaggagaaatctaccatcagaacagacagtgtcttcgtaatatttcttgtcaggagccagactgcacctgtccccagtaatgtatatggaacaagtctatctgcaagatgttctgccttaccttctacagaagacttcagtttttcagaatcctcgatcattgtcacaatcttctcaaatctcgtagagcctgataccgctttgacaagaacttcaatctcaccttcttcgagaactgttccggcgaaaacagactgtcctacacttcttcttacaggaagtgactcacctgtaagagatgcctgattgatcattccttcaccagtaactacttccccatcaaacgggatcacatttcccatacggatcacaacatggtctcccggctcaatatctgatgattttacaagaatctcctgttcatttctcttcagccacactttattgacattcagtgacatactacgcgcaagatctccgacagactttttatgcgtccattcttctatgatctcaccaattccaagcaggaacatgacagatccagctgtagcataatctctacggaatacggaaacgctgattgctgtagcatccagaaccggaacctctatcttaccatgcatcaggcaacggattccgtgccagatatatttcactgattttacagatgtaatcactgcacggatcggcattggaaggaataacttacttccataatgaagaactgtcttcatgaccagcttttcctgataaacagcattcagctctcttccagaacctgcagcaacatgttccggaagaattgcattttcataagaaaactgcttcaataaattcaagacctcttccttatctccaacataacagatcacagcatctgcggtgcgttcatatacttttacatctgttacattcttctgattggagagaaaccaggatagagtatccgcctccgtatatgtcatccttttctggacaacatggatacgaaggcggccattgatctcatgctttacaataaatttcatagagatttaaacttcttcctctttgaaatcctgcgcacctgtattctcttcctgagtttctgtctcttctgcttcttctgcttcgtagacagcctcagcctcttttgctgcacgtgactcattgatctgctgagcctctgcaaggatatcttctgcattctcctgaacagttgttgctgtcttcatcacacagtcttttgctcttaaaactgctgctgtacagtttgtgtaaactttctttgcatcatcacttgcaagaattttcactcccgctgttccgaaaagaacacctcctgcaaagattcctgcttttttcaatttaaatatatcccacattgtataaaacctcctaaaatttttatacatcatatcaactcactatgcggatagtcaattctaactgcatttgtcgataaattttatcgtttattatccggtaatttaattgatgttactttttgatcttttacataaccgcaatgtttcagtccttcgcggatcaccttgttccatcctgtttctgtgagtttaaaaatcgtatcatcatccagcatgatgatacatcccccatcttccggacaatcctgcgcacaatcaactttatacatattttttctgttgattgctccgatttcttctaatgcattgatcattctgtaaacagttgccacaccgatcttttcatctgcctgggatgccttataaaagatttctttacagcttgagcattcattttctaaaataatatcaatcaacattttacgctgttttgtgatccggcacccgttttcttttagtttttcaataatctgttctttcttactcacggtacacctcctgcttcctggttttcgctgtatcagttgctttgccatctctcacagagttttactcttatgagatagaagtgacctcataccctgctttttttactgcatttttcaaatctgtcagatcaatttctctgtcgtaggaaacttctgcactattgtcctttaaattcacttttgcagtaataccgtccaatccattcaatgcatttgttacggtattcgcacaatgctcgcagtgcattcctgaaatcttcaacgtttttctgccaatcaccggaccgtctaaaaactttgtttttgctttcttgttgcttcctgaaccgcctccgcaacaaggaccttctcctttaaaatgtttgattgatcctttcagagccaacccaagcaagatgattacaattaatataatgataatatctgccattttgtgatccctcttttagtcttctttctcttctctgttttctcgccatttcttgatccacagataaatctgatagatggatacaccaacaaggtaaatcaaaagaaatgcaccaaatgcgtaaaacatagaacctgttgaatttcccattctaatcaccttttactttttctttgtatattgagattttccagctgccgcactgcatccgccgcagcttccacagttgccactgcatccggcgcatccgacatgtttcccttctttatggttcttatatcctttataaatgagaaaaatacaatatccgataattaaagttattattacaatatttgctatcattgtcatcaacacctcttttttctcttattataacagagagccggatacatttcctgcatccagctctatttttcaagaacgctttcacgttcttgtttctctcatattacgctgcctgcacagaacgttttgagtatactttctgatctttgtacggatctggtctgaagagcatgaacagaaggaagatcaataagataaatcctactgctgtacctacgccaaatgctccgcctgttacgaaagatcctacctggtatacgatcaggcaaacaacataagcaaatacattctggaacaggattgcaaaccagaaccattttctggactgcatctgctgtgccattgtcgcgattgctgcaagacaaggtgagtcaagcaggttgaacagaaggaatgtaaatgctgcaattgttgacgggaaccaggaagcaactccctgcgctactgtcactgcgtcttctgtatctccggacacatttgcaagaactcccattgtagaaacgattgcttctttcgctgtaaatcctgagatagatgctgctacaggctgccactcaccaaatccaagtggtgcgaacagtggagcgatcactccgccgattgctgccattaagctgtctgcgctgtcttctacaagtccgaatccatctgctgtaaatccgaatcctccaaggaaccacattactacgcatgcaaggaacaggattgttccggctttgatgatgaatcctttcagtctctcccaaacatgaaggagaactgtcttagcctgtggaatatggtactgtggaagctccattacgaacggagccggttttcctgagaaaggttttgtcttcttcaggatgattgcagaaacaagtactgcaacgattcctacaaagtacatcaatggtgcaatgaaggagctctcctgatatcctgctacttcaccggcaataactccacccatcatagcaataaccggaagttttgctccacatgggataaatgttgctgtcatgattgtaagacgtctgtcgttgtcctgctcaattgtcttggaagccatgattccagggattccacatcctgaagaaatcagaagcggaataaagctcttacctgaaagtccgaaatgtctgaacacacggtccatgacgaatgcgatacgtaccatgtatccacagtcttcaagaatagacaggaaaaggaacaggattgccatctgtggaacgaatccaagtactgctccaagtccgccgatgataccatccactacaagtccgttgatcagatcacttgctccgacatttgtaaggaatcctccaactgcctcctgaatggctccaacgaatgtatcatttgtccagtctgttacaaatgtacctactgttgtgacagatatgtaatatacaagccacataactgcaatgaaaatcggaataccgaggatacggtttgtaacgatacggtcaattttatccgatgttgtcagtttttcttttgcttttttaacagtagttcctacaattttctgaataaactgataacgtccgtcagttacaatactttccatatcgtcatcatgtttcttttccagttttgctctttcatcttcaacaactgcttttgctgcacctgagagctttatctgatctacaactttgctgtcattttcaaggaactttacagcgtaccatctttttttatcttctgtaattgtatcaggaaggatttcctttacgctttctacagcagcttctatatcttttgcaaagatctcactaggaagttttacttccttctgctttgcaactttgattgcttcatcgatcagttcatccagacctttctgcttcaatgctgaaatctcaacaattgggcatccgatcagcatggaaagacgttttacatcaatcttaatgcctctcttagcgagaagatcgcacatgttcaatgcgattacaaccggtactcctgtctcaacaagctgtgttgtaagatacaggttacgttcgatgttagttgcgtcaacaaggtcaacgattacatccggattctcattcagaacgtaatcacggctgacaacctcctcaagtgtatatggagaaagggaataaattcccggaaggtcagttactgtaacgtcttcctttttgtatttcttattcttgatcttaccttcttttttctctaccgttactcccggccagtttccaacatactggtttgctcctgtaagagcattaaacagtgttgtcttaccgcagttcgggtttcctgcaagtgcaattgtgattgccattactctctttacctccttaaattctagaatctctcatcaggttctttgtatctgtaggcttatttaacctctacacactgtgcatctgcctttctgacagtaagctcgtatccacgaactgtaatttcaaccgggtcaccaagtggtgcaacttttctgataaaaagttcacttccttttgttattcccatatccataatacggcgtttgtaagcactgtctccttcgatttttgtaactacaacagtagttcctacttttgcatcacctaaagtcataacacatactccttccttactttactcatcactttttcagcgtctcaatcagatcataatatggcgcgccatatcagcatttactgctactctcgaatctttaatattaacaataacgttaccgccaattgcagatagcacgaccacttctgctccgggcacaaatccaagattcgcaagaaaacgctttgtctcatcatttccgcttactctcttaattgtattggtttcgccaatgttggccattgtaagtggcataatctcacgcttctttcttaaatgatattagaatccattctcatttgatatagattattaaaaacagttgagattgataatttttttcattttctctcctgttcgtaagttagtatatgctaatctctattagttgtcaatgactaatttatatttttttaatttttctgttccgtataaatcggaattggggaatcaaaatttgtctggcaaattatttgctgtagggaataaattatgatatactaagcaaagacatgaaaattcactgtaaatagtgatacagataaattctaatttatatagaggaggccattacctatgcatgtaaatgaatcatctgaaaattatctggagacaatcctcatgttaagcaaaaagcttcctgtcgtacgtgccgtcgacattgcaacagagcttaactttaagaaatcaagtgtcagtgtggcaatgaaaaagctcagagaaagcgaacacattattgtatctcgtgagggctatattacattaacagaatccggacaggcgattgctgacatgatatatgagcgtcacactcttctctcttcctggcttgagagactcggagttgatccacagattgccgctgatgatgcttgtcgtatggagcatgtgatcagcgaggaaagtttcaatgcaattaagaagcatattgtttctcattcttaatggactaaaaatgccgaaacacactctttttgagatatgttccggcatttttctttgttttttacgaagttggtgggattcgaacccacgtgccccggagggctaacgcattaaataaaggattttccatcttcattttcgtatatgttgtccgatgcgtgacgctcaaatattgtattaatatagtgttcaatcaacacacatgtttcaggggaatactccttatttcccgacttcagtatatcctatcccacacattcctcttttgtaatgtgccggattccatccatcttgcttgtattccactgcatttattacctgcataataagatcctcagacagcggaaaggcagattcttcctgcaattccgtcaatcgattatattgtttttccgtaactggatataaattcttataatataaatcattttcgttgttcaattgatgccatatttttgtgttattcaccttctcgtctttataggcgcatcctttatacatttcacatctacatttgcaattactgtttccatccaccattgtgaacaaccgcagttttgcagttatctggtacgagaatcttcgccacgccactgaaaaattcgtacatatggacatgatcattaacccatgatttttgcttcatatctagaaaggattctaacatatgtatactgactatatatcatcacaccgacaaagatgtaggctttgagaatacataagaggttcctctccattagtacggcaatgctccatgtattctgtccataggagctttttgtaactccattgcggagaagttcctttcggatgtaatcataatctggcatctgtttgacaaatgtaactttttttgcagaaggaaaaagtttttccgcaagaacagcatccgtatcattttcatcaagtaaagatttcctacaccggaatgacgattttctcaaagacggattagcggtttcctaactccggacagtagggacacagagaccagattattcaacatataataatattaacaaataaatacagaggaggttcaaagatatgaagaaatcagtatatgaaatgattacagaacgaattattgaacagttagaaaatggtgttatcccatggcagaaaccttggagcggaacacacagcggagcttataacagaataagtaataggccttattcattacttaatcagttacttcttaaacatggtggcgagtacgcaacatttaaacaatggagtggcttaggcggtaagattagaaaaggtgagaaatcggaaattgttacattctggaagattcaacaaatcgaagaaataaacgaagacggagaaaaaacaatcaagcagttaccattattaagatattacaacgtctttcacatttcacaggttgatggagttgaaccgaaagaacaattgaaaatttcagatcttgaatcgattgaagaggccgaaaacatcaaaaacgaatacatgaacagagaacatttaaagattttcgagacagtaacgaataaagctttttacacaccgacttttgattatatcgaagtaccttgtaaagaacagtatcaaaacattgaagaattttattctacactgtttcatgaaatgattcacagtacaggacacaagaacaggcttggcagattggaaacaggagcaagcgcacattttggaagtaaaacctattcaaaagaagaactcgttgcagagcttggaagtgctgcacttgtcaatatgttaggcattgagacagaaaagagctttaggaactcaggtgcatatatacagaactggttacaagcgttaaagaacgataacaagttcatcgtatcagcaagtagcaaagcagagaaagcagttaaatacatactgaatgaacaataagaattaagggtgtggcatacaggctacgccctattcttatatataaaaaggattaaagaaatacaagtaaactattgttacagctagtattttatatctcgtcaaataactgcattgataacaataaaaaaatggaaaacccatgtttagcaaggctttgataaggatggtagtagaaaaccagtaaaatcaaggctttgcagacagcaggcagacggtgcttttataaaaaatgaatatgaagatagaaaaagacgcatttttgagatttgcgtctttttctattgagctttctgctttaccttgaaacattagcagacaacaacaaacgccattgaatggacttccattgatggtgtttttttattgtctggaaaggagcagaaaaatggaaataacacatgaaaaagtaaaacgaaaggcggtctatgtgcgcccttaaattaggaagcctgtttgacggaatcggcgtgttccctcttgcggcttcccgtaatggaatcattcccgtttgggcaagcgagattgaaaaatccccaatagccataacaaaacgccacttcccagacatggaacatttaggggatattacaaagatacatggagggaacatccctcctgttcacattattacattcggttctccctgccagaacctttctaaaatcggaaagcgtgaggggctggccggaagcaaatcaggcctattttttcaggctatcagaattatagaagaaatgaggtgtgctacaaatgggttatatccagttatcgctgtttgggaaaacgtcatgggagcgttttcttcaaatgaccggatggattttagagccgtactgcaatcattttccgataccgaaatttcaatgcctcctactggaggatgggctaacgccggtatggtgcgagggggaaagactgacctgtgctggcggctcatggatgcccagtattggggaaagccccggcttgttcagcgaagaaagagaatcttccttgtggcagattttagaggacagcgttccgcagaaatactatttaagccccgtgatatgttcccgattcctccgccttgcacagactacgggctgcccgccgccggagccagtcgaatatctcttgataaaacaagggggaaaatacccgtcatccgcccctttcaggaacggcgtatgcggagtgctgcaaaatcaagaaaccagtctgctttcctcgcaagtttcggacggccagatgaaccttttccaactttactagcaaaagcagtcaatatgatttcattctggtatgagggggaagaaaaagacggagttctccgaaatttgacacctgttgagtgtgaacgcctgatgggattaccggaggggtggacagcatatggaaatttaggacagcccattagtgataatgcacggtgcaaagcacttggaaacgcaatcgccctgccgtgtgctgattacatcatggcaggaatagcagaaaccatacatgaataagaaaggcggttttgtatgacagagaaaaatcgctctcctccgttgtcggatggaacatcaacagaagctatcgaaccaactatattatttcagaaaggacaggtacatctatatggaattaaaattcgttatccccaacatggaaaagacattcggcaacttggagttcgccggagaagacaaaacagaacagagaagaatcaacggacgcatgacggtactctcccgcagcttcaacctgtattcagacgtacagagggcagatgatattgtggttatcctccctgccgaagccggagagaaacattttgactttgaggaacgtgtgaagctcgtcaatccccgtatcatcgcagagggctataaaatcggcacaaggggctttaccaactacattttgcacgctgatgatatgataaaagcgtaaggaaaaggaggacatcagactatgagattagcaaacggaatcgtgattgacaaggaagcaactttcggggcattgaaattttctgccctccgccgtgaggttcacctccagaatgaagacggctcggtatcagaagaaatcaaggagcgtacctatgacttaaaatccagaggacaggggcgtatgattcaggtttccattcctgccagcgtgccattaaaggaatttgattacaatgcagaggtggaaatcatcaatcctgtggcagacaccgtggcaacggctacctttcagggggcagaggtggactggtacatcaaggcggatgatattgtcctgaaaaaaggaactaccatgaatcctcagccgccgaagaaagacgctccccctgtaaaataacaggaatataagaagaaagcgaaaggaggattgttcccatgaagcagcttttcccccgtggaaaacgtatccatcccacggataaagaccttgtgttccatactgcccttgccgctctgtcccctgtcttcctgctggttgtcctgctgtttcatatccggcagattgccggaaccaactggcaggaagtgtccctctcccagataatacaggatgtaaatatcccctacctgttattcagcatgggcgtggcagggctggtgtgccttacagcagttcttctgttctggcgataccgcagggatgaagtaaagcagctcatccaccgccaaaagctggcaaggatggtgttggaaaacaagtggtatgaatcagagcaaaaaaaggaagacgcttttttcaaggacttgtcttccagccgttccaaagaaaccatcacttactttcccaaaatctactaccggatgaaacagggcttgctccatatccgtgtggaaatcaccttggggaaatatcaggagcagctcttaaacttggagagaaagctggaaagcggcttgtactgtgagctgacggataaggaattaaaggattcctatgtggagtacaccctgctctatgataccattggaggccgtatttccactgaggatgtacaggcaaaagatggcaggctccggctcatggaaaatgtctggtgggagtatgacaagctcccccatatgctcattgccggaggaaccggcggcggaaagacttatttcatcctgaccctcattgaagccctgctccgcaccaacgccatcctgttcgtgttagacccgaagaacgccgaccttgcggatttacaggcggttatgccggatgtgtactacaaaaaggaagatatgctcacctgtattgaccgtttctatgaggaaatgatgaaacgcagtgaagacatgaagctcatggagaattaccggacaggggaaaactacgcttacttgggacttcctgcacatttccttatctttgatgaatatgtggcatttatggaaatgctcggcacaaaggaaaatgccgccgtcctcaacaaattaaaacaaatcgttatgcttgggcggcaggctggtttcttcctgattctcgcctgccagcgtccagacgcaaagtatctgggggacggaatccgtgaccagttcaatttccgtgtggctctggggcggatgtcggaaatgggttatgggatgatgtttggggaaaccacaaaggatttcttcctcaagcagataaaagggcgtggctatgtggatgtgggaaccagcgttatctcggaattttatacgccccttgtgccaaaaggacacgatttcctcaaagaaataaaaaagctcatagacagcaggcagggagtgcaggcggcgtgcggagcaaaagccgcagaaacggactgacctactgtggctggtgtgccgcaaggcacgccagcataaacccctcgtatctaacagaggggtacaaatcgacaggcaacaaccaaacaacagggcagaatcccacggtacacaagggattttccccatatccggcgtgtgtcaacaaggctctgaaagttgacatacgcttttttagacaggaggtattttcactgaatgaagaaacatgggtacaagacatcaaagagaaacgggaagtttacggtatctcacaacaaaaacttgccttagctgccggaattacccgtccgtacctgagcgatattgaaacgggcaaggctcacccatccgaagcattacaggaagccatcacggaagctctggaacgcttcaatccagacaatccccttgaaatgctctttgactatgtgcggattcgctttcccactacggatgtgaaacatatcgtggaagacgtgctgcggctaaagctgccttactttatccatgaagactacggcttctactcttacacagagcattactatctgggtgatattttcgttctggtatcgccggaactggaaaaaggggtgctgctggaactgaaagggcgtggctgccgccagtttgaaagctatctgctggcacaggaacggagctggtatgagttttttatggacgttctcatggaggacggcgtgatgaagcggcttgacctcgccatcaatgacaaaacgggaatcctgaacatcccccatctgacagagaagtgccggaatgaggaatgtatctcggtcttccgcagctttaaaagctaccgcagcggcgaactggtacggcgtggggaaaaagaatgtatggggaacaccctgtatatcggctccctccaaagtgaggtgtacttctgcatttacgaaaaagactatgagcagtacaaaaagcatgatattcccattgcggacgcagaggtaaagaaccgctttgaaatccggctgaaaaatgagcgtgccttttacgccatccgtgacctgttagaacatgacaatccagaacggacagcctttcaaatcatcaaccgctatgtccggttcgtggacagggacgatacgaagccccgttctgactggcgtatcagtgaggaatgggcgtggtttatcggggaacacagaggaatcctgaaactgacaaccaaaccggaaccctattcctttgaacgcaccctgcactggctctcccatcaggtagcccccacgttaaagctggctctccgtctggataagatgaaccacacccagattgtccatgacatcatcacccatgcaagactgacggagaagcacgaaaaaatcctgaagcagcaagccgccgctgcagaggaggtggtgctttaacggcggcaatcttggaacctaagaactcttacaggaaagaaaggagcttttatgaatttcggacagaatctttacaactggtttttatccaacgcccagtcccttgtgctgctggcaatcgtggtgattggactgtacctcggatttaagagggaattttccaaacttatcggctttctggtagtttccctcgtagcggtcggtctggtcttcaatgcagacggtgtaaaggacatcttactggaactgttcaataagattatcggtgcataggaaacccttgttacacttccgttatggagcaagctctgattgcttcatggcggaagtccactaggggcttggggagcgtaactccccaaaaacctgacagagaatggaggtgacactgattgaggaaatgaaaatctacatcctgaacaccacacggttttaccatgaggattttgaggaataccctggggcatggttttcctgtcctgtggattttgaagaaatcagggaacgtcttggggttcagagtgaggaagaaatcgaaattgaagactatgagctgccctttccattggagggcaacacaaggctctgggaaatcaacgccctttgccggatgatacaggaaatgcagggaacgcccctctattatgaaatggatgtggtacaaaagcggtggttttccagctttacggaatttatcgaccacaaagaccagatacgctgctatccggtgcaggacggggaatcccttgcccgttatctggtgcaggaggtacagctatttggagaaatacatccagacctgttgaaccatatcgactacgctgccattggtcgggaactggaaaacagtgaacactacctgtttacggacaatggtatcttttattaccgctaaaaggaggtggaggaacttggaggaaatgcggatttacattgccaacttaggcaaatacaatgagggcgaactggtaggggcatggttcacgccacctgtggactttgaggaagtcaaggaacgtatcggcttgaatgatgagtatgaggaatacgccatccatgattatgagctgccctttgcgattgacgaatatacccccattgaggaagtcaaccgcctgtgtgagatggtggaggacttaccggaatatattcaggaggaactatcggagctgcaatcctactttggcagtatcgaagaactctgtgagcatgaagacgatattatctgccattccggctgtgacgatatggcggatgtggctcgctgctatctggaagaaagcggacaacttggggaacttccggcacacttacaaaactatatcgactatgccgcctatgggcgtgacatggaattggagggaacctttgttgtcacgaaccacggcgtatatgaaatcatacgatagacccgtctgtatctctttttggaagtacaggcggcttttttatttcaggggcggcttttgctgccccatcttttagaaaggacagacactatgaagaaaatacgaagctataccagtatctggtcggtggaaaaggtactctattccatcaatgattttaagctgccattccccatcacgttcacacagatggcgtggttcgtggtgtcggtgtttgcagtgatactcttagggaacctccctcctctttcgttcattgacggagcatttttgaaatacttcggcgtaccctttgccctcacttggttcatgtgccagaagacctttgacgggaagaagccttacggcttcctgaaatccgtactggcatatctggtacgcccgaaactgacctatgcaggaaagcccgtgaagctggaaaaggaatatccggcacaacccatcacggcagtaaggagtgatatttatggcatatccgattaagtatatcgaaaataaccttgtattcaaccatgacggggagtgcttcgcttactatgagctgcttccctacaactattcttttttaagccctgaacagaaatatcaggtacacgattccttccggcagcttatcgcccagaacagggacgggaagattcacgccctgcaaatcagcaccgaatccagcatacgggcagcacaggaacgctccaaacaggaagtgacgggcaagttaaaggacgttgcctgtgcaaagattgacgcacagaccgaagccctcatttccatgataggggaaaatcaggtggactaccgcttttttatcggcttcaagctgcttgtcaatgagcaggaagtcaccatgaaacagtttcgcagggaagcaaagaccgctgtttccgacttcctccatgaagtcaaccacaagctcatgggggattttgtttccatgagcaatgaagaaatctggcggtttcagaagatggaaaaactgctggaaagtaaaatctcacgccgctttaaagtccggcggctggataaagacgattttggttatctgattgagcatttatacgggcagaccggaaccgcctacgaagattatgagtattacctgccaaagaagcggtttcaggaagaaacgctggtgaaatactatgacctcatcaaacccacccgttgtctgatagaggaaaaccagcggtatctgaaaatcgaacaggaagacgggacagtttatgccgcctactttactatcaacagcattgtgggggaactggacttcccatcctcggaaatcttttactatcagcagcagcaatttacctttcccattgatacctctatgaatgtggagattgtcacaaaccggaaagccctctctacggtgcggaacaagaaaaaagagctgaaagatttggacaatcacgcatggcagaatgacagcgaaaccagtacaaacgtggtggacgctttagacagtgtgaatgagctggaatccaccttagaccagagcaaggaatccatgtacaagctgtcctatgtggtgcgtgtgacggctcccgacttggaagaactgaaacgccgctgcaatgaagtgaaagatttttatgacgatttaaacgtgaagctggttcgcccctttggggatatgctggggctgcatggggaatttctccctgccagcaaacggtatctgaacgattacatccagtatgtcaccagcgacttcctcgctggtcttggcttcggggcaacccagatgttgggggaaccggagggtatttatatcgggtatagccttgatacaggaagaaacgtgtacttaaagcctgcccttgccagtcaaggggtaaaaggctccgttaccaacgcccttgctgccgcttttgtcggctccctcggtggtggaaaatcattcagcaacaacatgatagtctattattccgtattatttggggcacaggctctcattgttgacccgaaagcggaacggggacgctggaaagaaaccctgccggaaatcgcccatgaaatcaatatcgtaaacctgacttcggaggaacagaacaggggcttacttgacccgtatgtgattatggagaacccaaaggattctgaatcactggcaatcgacatcctgacctttttaaccggcatttccagccgtgacggggagaagttccctgttcttcggaaagccatccgtgcggtgacaaacagtgaagaacgggggcttttcaaagtcattgaggaactacgggcggagggaaccgccatcagcaccagcatagccgaccatatcgaatcctttacggactatgactttgcacacctgctcttttcggatggggatgtcacacagtccattagccttgaaaagcagctcaatatcattcaggtagcggatttggtgctgccggataaggaaacctcatttgaagaatacaccacaatggagctgctttccgtggcaatgctcattgtaatcagcacctttgccctcgacttcatccatactgaccgcagcgtgtttaagattgtggatttggatgaagcatggagcttcttacaggtggcacagggcaagaccctctctatgaagctggttcgtgccggacgtgccatgaacgcaggcgtttactttgtcacccagaacacggacgatttgctggatgaaaagctgaaaaacaatctgggcttgaagtttgcgttccgttccacagacatcaacgaaatcaagaagaccctcgcctttttcggggtggattccgaagatgaaaacaaccagaagcggctccgtgacttggaaaacggacagtgccttatcagtgatttgtacgggcgtgtgggcgtgatacagttccatcctatctttgaagacctgttccatgcctttgataccagaccgcccgtaagaaaagaggtggaatgatggtgatacatagaacttccaaccgaccgcaattcccagttccctatcacacaaaaaagggcttgtcttggaagatagcaggaaaagtgattggcagggtgcttctggcactcctgctcatcctcctgctgctggcagtcttcggcacagccgcccacgctgccggactggtggatgatacggtggacgctgccaacgaatacagcaaataccctctggacaactaccagcttgatttttatgtggacagcggatgggactggctcccgtggaactggctggacggtatcggaaaacaggtaatgtacgggctgtatgccatcacaaattttatttggacaatcagcctgtacctttccaacgccacagggtatctgattcaggaagcctactcactggacttcatttcctctacggcggatttcattgggaaaaatatgcagaccttggcaggcgttaccaccagcggcttgtcctcggagggattttatgtcgggttcctgctgattctcattctggtggtagggatttacgttgcctacacagggcttatcaaacgagaaaccacaaaagccatccatgctgttgtcaacttcgtggtggtgttcgtgctgtccgctgcctttatcgcctatgccccagattatatcgggaaaatcaatgaattttccgcagacatcagtaatgccagcctgacccttggcacaaagattgtgctgccgaactcggaaagtcaaggaaaagacagtgtggatttgatacgggacagcctgttttccattcaggttaagcagccgtggctcctgctgcaatatggcaactcggatgtagaaagcattggggctgaccgtgtggaaagcctactctcaaccagtccggatgaaaacaacgggcaggacagggaagaaatcgtggtggaggaaatcgaagacagggaaaacaccaaccttaccatcacaaagaccattaaccgcttgggaaccgtcttcttcctgttcatgttcaatatcggtatctccatttttgtattcctgctcacggggataatgattttctcacaggtgctttttatcatttacgccatgttcctgcctgtgagcttcctccttagcatggttccctcttttgaggggatgtcaaagcgtgccattacgaaactgttcaacaccatccttaccagagccggaatcaccctgattatcacggtagcgttcagcatttccaccatgctctacaacctgtctggggaatatccgttcttcctgacggcgttcttgcagatagtgacttttgccggaatctatttcaagctgggggatttgatggggatgttctccttacagagcggcgattcccaaagcatggggagccgtatcatgcgaagaccccgtatgctcatgcacgcccatatgcaccgtttacagcataagttgggacgttctgtggcggctcttggggctggaacggctgcataccacgcaggaaaacaagctggctcagaccagagaactgcttcaacatctagttcttccaaacggacacaggcagaccacagcagaccagacgggcaggcagcaccggaaaaggaatccgtatggaaacgggctggttctgcggtaggtgcggcggcagataccaaagataagatagccgatactgccggacagcttcgggagcaggcaaaggatttgcctgtcaatgcaaagtacgccctttaccacgggaaaacacaggtatcagagggcgtaagggattttacttccagcgtgacccagacccgaactgccagagcggaacaacgaaatgcacaggcagaaagccgcagacagaccattgcagaacgcagggcggaactggaacaggtaaaacagccgcaaaagtcagcttccgaagcacccaaaggggcagctcctgtccatgaacgccctgttactgcaaagcagccggaagatttccaacatcatgcagatacctctcatacaggaaagccagctgtgcagcctgcttccccatccatcagggaacggggacaggttccttatgggagagctattgcagaacgggcttcggttccagtggtaaaagcggcttccatccaccatgaacagacaccgcctataaggacagaacgccagatagtccctccggcttccccagacaaaccagatgaaagacaaaagacaactactacacctgctgcttcccgtccggcaagacctgtccagaatgatacggctcctgtgataccagaaagaaaacgggctgcccctgtggtaaaagaatccaactttaccatccggcgtaccaccgccagaaaggagtggacaaaaacggtaacagcggcgtccaaacagaagaaaggggagaagccatgaagttaagacaccttttctttgcctgttccggcgtgttcgtgatgatgttctccctgctccttttggtggtgattgtcttctcggatgaggaagacggaggaagcagcgaaaaccttatctatgggggcgtgagcatatcacaggaagtcctcgcccataaacctatgctggaaaagtatgcaagggaatatggcatagaggaatacttaaatgtgctgctcgccatcattcaggtggaatctggcggcacgctggaagacgttatgcagtcctcggaatctctggggcttcccccgaactcccttagtacagaggaatccatcaaacagggctgcaaatatttctcggaactgctcgcagcggcagaaacaaagggctgtgacttaaacagtgtgattcagtcctacaactacggcggcggtttcctagactatgtggcaggacgtgggaaaaaatacacctttgaactggcagagagcttctcaagggacaaatccggcggaaagaaagtcacctacaccacccctgttgccgtagagaaaaacgggggctggcggtattcctatggaaatatgttctatgtcctcttggtatcgcaatacctgaccgtggcacaatttgatgatgaaacggtgcaggctatcatagaggaagctttaaagtatgagggctggacgtatgtgtacgggggcgattccccctccacttcctttgactgttcgggactggtgcagtggtgctatggcaaggcaggaatcgccctgccacggacagcacaggaacagtacaatgtgacgcagcacatccccctgtccgaagcaaaagcaggggatttggtctttttccactccacctacaatgctggaacctacatcacccatgtggggctgtatgtgggaaataaccggatgtaccatgccggaaatcccattggttatgcagacctgacaggctcttactggcaacagcaccttgccggagcccgacgaatcaaacaataagaaaggatgaaccgatatgattcagattagaaaagaggataaccagaaaaagcagaaagaaaagaaactgaaagtttacaaagtcaatacccacaaaaaaaccgtaattgccctgtgggtgctgctggcaatgagcttcctgtttgccgtctataagaatttcacagcgatagacattcatactgtccatgaaaccaaagtgattaaggaaacaatcctcgacacccacaagatagaaaactttgtggagaatttcgcagaagtctactattcatgggaacagtccgccgcttccattgatagccggacaaacgctttaaaagggtatctcaccggagaactgcaagccctgaatgtagataccgtccgaaaggacatccccgtatcgtctgccctgaccgattttcagatatgggaaatcacagaagaaaaggagcagcattatcaagtgacctatacagtggaacagcgtatcacagagggagaatccggtaaaaccgtccgttccgcctatcaggtgacggtctatgtggatggctctggaaatctgacgattatccagaatccaaccatcaccagcgttcccgtaaaatccggctatacgccaaaagcggtacaaagtgacggtacggtggattccatcaccacggaggaaatcaacgaatttctcaccacctttttcaagctgtaccctacggcaactgcaaaggagctgacctattatgtaaatgagggtgtgctgaaacctgtagggaaagaatatattttctcggaactggtgaatccggtttataaccgaaacggaaatcaggtgacagcttcccttgcagtgaaatatctggataaccagaccatgacaacacaggtatcgcagtttgaccttgtgctggaaaagaacggggaaaactggaagattgtgaaatagttatagaaaaacgtgcatttctcatttgagatttgcacgtttctcttataaaatatttctttttaaaatttatcattagtctttatatttttgattagctcccaatagtagtgtgtcaattgcttcggataattcttttcttactttatcaggattagaaaaagcatatcttaattgtaaagttgtataaccatgaagcatacctgttaccatgttcaaaatttcagtggtcttatctggattaaagccacatgagcaaataagtgttttaagtaaagatagataatcattaaaaatgattgctgtttcctctgttccattccaactagcccattgaattatttcataaacaccgggatgttcaatcatataattaagatattcaactgccactaattttaatgctgaatcccctgtcttaccgattgctgcacgaatcattttttcattcatagtacgcataccactatgtgctatctccctaagaagttcatccaaacttcctatatgattatataaggagggggtacgaatccctaaattttcagcaatagctttcaaagaaacattatgaagtccatttctatcagccatatcagaagcagtttttataacttcggcttttgtaactcgcatattcattttcctctttctacacatcatttacttcattttaagtaatcaaattaatgaagtcaataatttggttagaaaaaatgaactcttgtattgacaaacagccttataatatttaaaattactaatgtaattagtttttacactatttaaattagtttgcgaaaggaaatacaaatatgtgtacaagatttgtgtataatggaaaagaaaccattgttgggttcaattttgatattgacctttctgaatgggaacatactgtaattgccgaaaaagaccgtttttttatagggataaaaatgtccgataataagtaccactcttttcacggaatcaatagaaatgggaatgttggcacattgttgtatgtacatggaaatgacaatgcacaattttgcggtaatgaatcatgctatacaatagctgatttgacagaaaactttataaaaggcaatctctcttttgacgattcattggaaatagtgaaaaaaaagaaaattacttatgcacctgacactactatgcaggctatgttttcggatagaaatgggcgtgttctcattattgaaccggggattgggtatcgcttggaaaaagaaaaatattccttaataacaaattactccattttaaaaccagaattgactaatccatatgttttatctggggataacagatatgaaaaggcaaaggatttactgcaaggatatggagaaaacttctctatttccaacgcctttgatgtacttaggtcagtacgtcaggaaggactttgggcaaccagagtttcttttatatattccgttgctaaaaataaggtatattatgtgttgaacaatgatttcaaaaatattgcagagtatcaattctaatatcactgcaattataaacaaaagtggaggatttacatttcccccacttccttagatttgacaataccatctgcaacgctttccataataacaaggtcagcgtctgtgaaattgtctattttgctttcaagctgtcttcgtctgctgctttttgccagactatcagaggataaaaagaactcatccactgatacattcagcagagatacaaggtcgtaaagcacctgtaaacttgggtgctgccctttattctcaatgttggttaaatagcgtgggtcaatctcaatcattgctcccacctgttcacgggtcaatccctgttttttacgggcttcttttatggcaagcccaaacgccctgaaatcatatttatcttcttttttacgcataatacaccacctctgtacattttactgttcctgttgtaatagtgacaggtatagaaaaacgtattgtatagttgtacagttcctattatgcgtatcaaagataaaactatgctgccgaaacggaaataaaaaaaaccgttatttggcagtacacttttcttgcgtcaaaatctcataaatctttccagacgacggtttgacaaaagccgccgtctttcttttttccagaatatatggaggttgtattaaagtcagctttttttaggctccggcggcttacaggaggaagccgctatgcaaaatattttcttaaatatatctacattcggtaaaccgttaaaaaaagccatctacctacactagaaaattctgaccctcaatgtggtttttcagaatacatagaaagaactatcgaagcacacaagcagaaatatcgtctgtttgcgtgcttttttagttggaagaaaagggttttaattttttcttctcaaaacgcaactgcaccccctgtcctgtcgggactaagagcgaaaagggggaaagaagcagaaattcctatcgactcgctccctttcaaggctggaaagggggtgagcaatgatgaagccatctgaatttcagacaaccatagagaaccagtttgattacatctgtaaagtcgctatgaaggatgaacgtaaagactatctcaaagcgttgtccagacagtgtaaacgggaaaccttgttctgtgatatggacgattacaccgtcaacttgttttcttccgaagacacctatccatcccacttccatacttttgaaatggacggatttactgtccgtgttgaaaacagcctgttagcagaagcgttggaaaatctggacggaaagaaacgtgatgttatcttgagatattatttcctcggatttgacgatacagaaatttcaaaaattctggaagtcaaccgttctaccatccagagaagaagacacgccggactggaatttatcaaaaaatttatggaggaagaagcatgacagcaaagcaccctatgattccgtttcctgtgattgtaagggctgcggatggtgacattgaagcagtcaaccagattgtacgccattacagcggttttattgccagccgttccatgcgtcccatgaaagacgaatacgggaacacccacatggttgtagatgaaaccctacgccgccgaatggaaacacgtctgattgcaaagattttatcttttgaaatcagggaaccaaactagaaataacgctctcctgtggaagcatggacaagctcatgcttcccagacagagcttgccagtctattaaagtgcattatcaccagtgcattttaataggctgacaaagccggattgttccttgaaaaagaaagcgtctaatcaacgcagcataaagcagccgaatacgtttcgatagaaagagagccgttgggctggcacgccgtgacccaccaaaggagggatgaaaccggatagcgattcctgccagcgttccataagcagcttgccgcaaaagctgtcgccatgacctttctattgtgataatgatacttccgtacagccttagtccgtgtgatgatgtagcaccgctggcaaagggtacggctggatgagaaccatgcaggggtgagattcccatgagctttagcgaaagctgttcggtttgcttcaaagaaaataacaggaggttgttatcttatggaaaatacaaataatcctgcccctgaaatgatacgggaataccagataggaaacacctgctatgtggtaaaatctcgctcaaaagaacaggcgcaggaagacgcagtaacgaaagtaaaaaggcttatccgcaatgacttgaaacaataattctgagataaaacaaggcagacaggaaacagaaaatgcggtacaataaagttgtaaaagcattgtctgtttgactgtcggataggaggtacttatgttacagcagtcaaacagcactatcacttccatttatccgatggggaatcaaacagaggaattaaccgcattatactgtcggctttcacaagacgataaacaggagggtgattcaaacagtattattaaccagaaaaaaatcctgaagcgttatgcaatcgagcacgggtatcagccttatgtgttttttgtagatgatggattttctggtacaaacttcaacagaccggattttcaaagaatgattgcagaggtcgaagcaggaagaatcaaacgcgttatagtcaaggatatgtcaagacttgggcgcgattatttgcaggtgggaatgtacacagaaattatgttcccgaacatggatgtccattttattgctgtcaatgacggtgtggatagtcatgtgggagataatgaatttaccccatttcgtaacataatcaacgaatggtacgcaaaggacaccagcaaaaaaattcgtgcagtcaaacgttctaaaggaatggcaggcgagcatatcggttctcacgctccttatggctacatgaagaatcctgacaataaaaaggaatggcttatagatgaagaagccgccgaagtggttcgggaaatcttccgtttatgtgtcaatggttatggaccgacacgaattgccaatattctaacggaaagaaaaattctttgccctacttattatgcgttagagcatggggaaaagccacgaaccgttcttccacctgacaaatatctgtggagcgcaactgtggtatctcatatcttagaaagaatggattatttaggacatactgtgaattttaagacccatgttaagtcttataaaaatcgcaaaaaaattgataacagtcctgaacaatggaggatttttgagaatacccatgaagcaatcattgacaaggaaacctttgagattgtacagaaaatccgttccggaaaacgccgccctaccaaaatgggggatatgcctatgttctctggtttgctctactgtgcagattgcggaagcaaaatgacatttcataggcaaatggcacagagcgcagagaaacataattttgtatgcagcaattaccggcacaattcaaaatcatgtactatgcactatattcgtaatgtagtagtcgaacaaattgtgttggaaaacctgaaagaagttatccgctatgtatcagattatgaagatgaatttgttcagatggtcatggacacggatatgcggcaaagaaataaagaactgtcgcaaaagaaaaaacggcttacagaaatccattcccgtattcaagagttggacaaaatttttcaacggatttatgaagacaatattagtggaaaactttcagatgagcgctttatgaaactttcaaaaggatatgaggaagaacaacatactttgcaggaagaacagactttcttagagaaagaattacagaaagaagaaaaacaatctgtggatgtaaagcaatttctttcagtagtccgcaagtacactaaccttacagaactcacaccagaaattgtgcatgagtttatcgacaaaattattgtccatgctcctgataagagcagcggtaaacgtttacaggaaattgaaattatctataaccatatcggagtattcgaccattcaaaggtcattttgtggaaaggaaaagcggtatagtacataacatactataccgcaaaacctaaatcttaaaaacatccttaccaaaccctcacatttaaaaggatttcccactaaacatacaagcggagttggtgggattcgaacccacgtgccccggagggctaacgcatttcgagtgcgccccgttatgaccacttcgatacaactccatatgatattttctgccttgacagacatctttataattatagcatttcttcttgaaaaatcaagtgataattcctcttaaaaatttaaatccatttgaagtttaacgttgcaaatgcaatgaatacgtatataataaatatgatatcaaaaacaggctcttccttcttatctatataactttttaagggggactctcatgaaccacaatacactcgtaattgaaatcaaatctacacttgataaacttattgctgccagaactagtcttggttatgattacattgtgtatggattgctcttgataaacgaggatcagactcgtgtatccaatattaccaaagctttgtacatcgatattgctgcccattatgaaactagctggtcttgtgtagaaaaaaacatccgcaatactgtcaatgcaatctggacctcagaaaacaggactattctcgaaacgattttcaacaaaacctatactgacagaaaaccaacaaacaaggaattttttgagtatttatatgatttcatttttctgtcacaggaaaacatatcaactcaatcagaagaaattacatcgtcaatactctgtcctgtctgtaataataaatgtcaggttgtcgaaagtatgatttctttcgtagccaagcgacttcagcccgaacctgattgtactcacgtatgacacctaatccaaaaaggattttaaaataaatcaaaccggaattcttatatgatccggttctttcaaaaggacctcccttcaatcaccgggaagccctttttatatctgaaataattataacttttctctttcttccataatccagtccatcactctctcaattccttctcccgtcttcgcgctgaccggaagaacaactgcatttggatttaatttcagaatccgttctttcgcaacttcgaagtcaaaatcaaaatactccaaagtatctattttattgatcaacaccagatcacttacctgaaacatcagcggatattttagcggtttgtcatccccttccggcacactaagaagcatcacgttcttatgagcacctgtgtcaaactctgccgggcacaccagattcccgatattttcaagaattaacagatccagattctctgtatcatattcaagcaatgcacgggataccatatctgcatcaatatggcacaatccacagttatggatctgaatagattctactcctgtcagatctgcgactctctgtgcatctaaactggtctcaatatctacatccatctcaccgattctcatctgatctttcattctgttgatcaatgcacttagaagtgtagttttcccactccctggtccggacataacatttaaaaatagtgttctctgcgcactcattttctcgcggattgcctttgaagtagcatcattatccgcaaatacgctttctttgatctcaattactctgacttttcccatattcttccccttcatctgtatgtttatgcatttattttctctatctgttccagcagataatcagccagttcttttacacccttgcctgtctttgcagagatataaaaaatcttaatctgtgggttcagccttcttgcacatgcctcaacatagtcttttcgaaaatcaaaaacaggtagtgcatcgattttatttattaccaacacatctgacacttcatacatcagcggatacttggccggcttgtcatctccttctggaactgaaagaatcgtcagattaaaattcgcccctgtatcgaactcggccggacaaaccagattaccgatattctcaagcacaacaaaatccagctcgtctctttcaaatgctcttattccctgccgtgtcatatctgcatccagatggcacattcctccggtatgcagctgaatcgatgggatccccgcttcgatcaatgtattcgcatccacatcagaatcaatatctgcttccatcacaccccacttgatctttccatcgaaataaggtttcaatgccagaagcgtacttgtctttccgctgcccggactggacatcagattcatcagacaagtcttctgcgcctttaattcctgacgcagtacctgtgcatctgcattgttgtcttcaagaattgtctcttttaattctattatttttgctttttccatacgttctcccctcggtgtcggacaccgttctttttcttttgccactcacattattatatcaaaaagacatgattttgtacaatttttataatgtctttcttacatctctgtgatataatttcgttagatacaactaacataaactattcttttctaatatgtgtgagttttatctatcttgttagaagccagggtattcctaactaagataaactcaattctcacacagaacagggggcagactatgtttttatccttaactaatatcaaaaaatcctttgggcagggtgacagccgtgtggaagtcttaaaaggcattgatctatcgattgaaaaaggagaattctgtgttcttcttggaccttccggctcgggaaagtcaactttattgaatatcatcggtggcattgaccgtgcggacagtggtcagatcataattgaagatgagctgatggaaaaaatgactgtaaaacgtcttagtcaataccgaagaaaacatcttggatatgttttccagatgtataatctgattcccaatcttactgtgcgcgaaaatattgaagtcggtgcttacttaagtgatcacgcgttagatgtagatgaacttcttgatacccttggtctttctgcacatcagaagaagctgccgaatcagctctctggtggacagcaacagcgtactgccattggcagggcgattgtaaagaatccggatattctgctctgtgatgagccaaccggtgcgcttgattataaaacgtcgaaagaaatactgaagctgattgaaacagtcaatcaaaagtacggtaatacagttgtaatggtaacacacaatgatgcgattaaggatatggcagaccatgttgtccgaattcgtgacggtatggtacgaaagaattacctgaatgaccacaaagttactgcccaggatcttgactggtaaaggaggcaacagacaatgaaaaatccattaaacaaacgtctccccagagaattccggaaagactttggtaaatatcttgtcattttccttcttcttgtaataaccattggttttgtctccggattccttgttgccgatggcagcatgatcaaagcttataatgaaggaatcaacaaatataatacagagaacgggcatttccgcacttctgaaaaaatgaacgatgcgcagattcagtctgtagaagaaaatggtatccgtatctatgacaatttctatctggaacaagatttaacaaatgacagtacgatgcgtatctttgaaagccgggatcaagtgaatcttgcctgtctcatggaaggagaatttccaaaagcggcaaatgaaatcgccatcgatcgtatgtatgctgacaacaataagatttccatcggagacacactgaaaagtggtacacagagctggaaagtaaccggattcattgctcttccggattacagctgtctttttcagaacaacaacgattccatgtttgattctgtcaaattcggaattggagttgtaacgtccgaagcatttgaatcactagattctccacttgtaaaatactgctatgcgtggaaatacaataatgaacctacgacagagaaagaagaaaaagaagtatctgatgatctgatgaaagcaatcaacaaggaggtttctctggaagaattcgttccgcgttatctcaaccaggcaatcacatttacccgggatgatatgggaagcgaccgcgcaatgatgattgtatttctttatatcgtaattgctatcatggcttttgtctttggcattacgatcagcaacaccattgcaaaagagtcgaatgtcatcggaactcttcttgccagtggctacacaaaaaatgagctgattcggcattatatggcgatgccgattcttgtcacactgattggtgctttgattggaaacattctcggttatacgatcatgaaagatatctgcgccggcatgtattacggaagctacagtcttccaacatatgtaaccgtctggaacgcagaagcatttctgcttactacgatcattccgatcttgctaatgcttctcgtcaattacacggtactttgcagaagattatcactttctcctttgaagttcctccgcagagacttaaagagaagacaacagaagcatgcattatcactgagcagaagaattccatttttcagtcgcttccgactacgtgtgattttccagaatatcagcaattaccttctgctgttcctcggaatcttatttgcaaaccttctgttgatgtttggtctgctcttccctgctgtactcgatcattatcagactgttctacaggataacctgctttgtaactaccagtacattttgcagataccaatcaatgctatggatgaagatcataaactggagagccttgtaaatatgctctattttcagcatgaagtagaaactgataatcctgatgccgagaaattcagcgcttattcactgaaaacaacagataagaaatataaggaagaggaaatcctactctatggacttgcagataacagccgctatcttccaattgattttcaggaaactgtatctgacaaagatgtttcaaaaaaagaggatgcttctgatgcaactcctgcatacatctcttctgcttatgcagataaatatcttctggatatcggtgatgaaatcactttaaaggaagcttatgaagatgatacatacacgttttctattgaaggaatctacgattatgaaggtggtctgaccgtttttcttccacaggatacgctcaatgaactgtttgaccttggttccgattacttcagtggttatctctctgacagcgagatatccgatattgaccagaaatacatcggctctgtgatcgacctcgacagtctgtctaaaatctccagacaattgaatgtttcgatgggaagcatgatgtatctgttagacggattttcaattgtgctctttatgattctgatctatcttttgtcaaagatcattatcgaaaagaatgcacagtcaatctctatgacaaaaatattaggatactctgaccgggagatcagcagtctgtatctgctttctacaaccattatggtcgtggttttcctgcttctgagttttccgattgaaacagttcttatgaaagcgctcttccgtggaattatgatcagcagtatttccggttggattccgttgtatattgatccggtcctgtatgtaaaaatgttcctgctaggattcggaacttacctgcttgttgcattgatcgaataccgcagaatcaagaaagtacctatggatcaggcattaaaaaatattgaataatcgtgactgtacctgcatctgctgcctgcgaacattactgttcacacgatgtgcgaccagcaacgcatctcgccattttaaatcgcctttggtgatggggcgagatgcattcaagccaaaacatgcatcctccgtgtcaatcagcaaagtgattgacacgggagtgaacagtaacctgcaaacttctaagttaggcataacagtgcaggtcccatttgaaaggaggatttctcgtgaaaagaaaactattacaaaaattagttcctggtctgtgtgccagtcttgtcctggtttctgccacaagtctgaccggatgctcaactgacaccaaaacagctactactgcttcagatgctgacaaatcagaaacggtatatgtaaaagctgatgcaagcggaacgataaatgagatcaaagtccagacagacttgaaaaataacggaacgtcaaaggaaatcaaagacttctcaactctgaaagacataaaaaatacgaaaggaaatgagtccttcacccagtcctctgacggaacgattacctgggaaaacaaaggggaggacattcattatgaaggtacttctacagaagaacttcctgtgaatgtaaaaatcagttacacactggacggaaaatctatacaaccggaagatctctctggaaaaagcggcaaacttggaatccgttttgattataaaaatactactgaagaaaatgtaaccataaatggtgaagagatgacttctccggttccattcgcagtgatctccgccatgattcttccggaagatactgcttctaatatccaggtgacaaatggtaaaatatttaccatgaataaccagagcgtcgttgtcggttatgcctgcccgggacttaaggacagtctgaagcttactgattatgaacctacggaagatatctctatcccagaatcagtggaagtaactgcagatgtaacagattttgagatggactttaccgcgaccgtaatttcctccggtctgtttgaagatctggaagaggattcctttgacgatatggaggatgcagctgacagcctgcaggaactcggagatgcatccggcaaacttgctgacggagcagcgcagctgctgggcggcgcttctacttatcaaagttatcttgggcaatatgtagacggtgtctcacaacttgccgaaggatcagacgctttagataacggtgtaaccgcacttaatgaaaattccggaaagctggttgcaggtgcttcttctcttcaaaatggtcttgaacagctgaattctgctctctctggccagataaacacggattctggttcccttccgtctgcagagacactttcatcacttcagggacagatcaaatcactcagccaacagctggattctgttgattcctctcttgcagaggcgaaatcctccttcgcatctgttaactgggacactctgaaatcttctatcacagaggacgcaaaagaacagtccaaaaccgctgcgacagatgctgtccagtctgcgatcgatcagattgtttctgaaactgcatcagattcagaattatcagaagaatctaaaaatgctgtcaacgataagatgtcacaattaaagaatgaaataaatgatacgattgcatctgcaattgatcagaaccttgatctttcttcttcctccacagatatcgatcagctgaaatccgccacggaaggaacattaaacagcctgacggaactgattgcttcctgccatactacgcttgaccagatgtcttccggtgccggttcctttgctcaggcagcacagagtctttcttctctcagtgagacattaaagactttacagaactcactttctgctttatctgccggcagtttacagctcactcagggacttacctctttccaacagggaatcagtcaattgtctgaaggcagctcaacgctatcccaaggagctactaaactgggcacagccgggaaagagctaaaagaaggatacacaacccttgccgaaggaatctcttctctctctgaaggacttactctctttgataaagaaggaatccaggaacttgaaaaactaggcggggatgatctgaagaatctctccaaaagaatgaaagcggtcaaagaagcggacgctgaatacgataattatggcggtaagttagaagaacagaccggggaagtacggtttattattgagacagatgggattgattaatagacttagatgaatgagaaaaggcggtggaattcaccgtcttttcttaaaatacacactttacttttcatataaaagtactatacttatttatgatttaaatgaattactttacaagaatacggagataattttatgaccatcagtatacttctcatgaaacaaattgcacagctttttcttatgatctttatgggatacttaattgtaaaaacaggtattgtcgaggataccgacagtaaggtattatccaaaatcatcctctatctggtcatcccttgtgtaattataaacgcttttcaagttgattatacttctgacactgtgagaggattgctactggcttttatagcatctgttctcacacagattgtccttcttattgttgtctctgttttagggaaactttttcatttaaacgaagtagaaattgcctctatctattactctaattctggtaatctgatcgtaccaatcgtaacttttatcttaggaaaagagtgggtattatatggatgtgtattcatgagcgtgcaactcgtttttatatggactcactgtaagaaaattatcagccaagaggcttcttatgactggaaaaagattgtcctcaatataaatatgatttctatttttattggaatcctgcttttctttacaaaaatccatttaccggaaatcataaatgattcgataagttctgtcggtaatatgattggaccagcaagcatgatcgtaacaggtatgcttttcgccggtatggatctgaaacagatttttacaaataaaaaagtttattttatctctattctcaggttaatcgtattacctatatttgcactgattctgattaagttgagccatctcgccgctttttcagcagatggagataaaatcatgctcattgtatttcttgcaatcattactccatctgcctcaactgtaacccagatgtgtcaggtatacggaaatgattctcaatatgccagtgcgatcaatgttgttacaacactgttttctattgttaccatgccgcttttagtgatgctatttcaaatgttttagctatgaaattcttccattctccatttcgtagaccacatctgccacgttcattgtggacactcggtgggataccaggacaacggttttctttctggctgattcttttaatgatcgtaaaataattccctcatttaaagagtcaaggtttgatgtaggctcatccatcagaatcatcggtgcatcatggagaaatgctcttgcaattccgattctctgtttctcaccgccagataatgtatcacctagttctccgacttccgtatcatatccttttggaagtgtcataatgaaatcatggatagacgctttctttgcggcttccataatctcttctctggatgctcccggctttgcgatggcaatattatttgcaatggaatcatggaacaggtgtgtttcctgtgtcacgtaactttccatatctcttaaatgcttggtcggaatcttgcggacatctgtaccgtctaccgatacacttccgtcctgcacatcccagaaccgcatcagcagttttaagagtgtagattttccggaaccgctcgcaccatgaatccctgtgatcttacccggctgtaatttcagtgaatagttatccaaaataacttcctcaccgtaagcaaatgttacgttctctgcctctgctcctgtaaatttatgttccatgctctctgcaccggaagtttccacatcacccggaatttcttccacaagcggtgtctcttccagaagagaaaggacacgctcaccacttgccagtgtctggttcaggttgttggaaaggcttgataatgctactaccggtccgaaagaacccatcattgcgatggtacaggttaagattccctcgaaccccatcgcacctttgtcgtacagccagatcgtcaatgccagcattccaaaagatgcaagcaggataaccatattcgtaaatgaacgctgtgagccttccattttgcttaatgattcctgcattcctgcaagatttttggattgcttgctcatctgctctcttctcttttcaccctgtccatactgaatggtctcgtccagtccacgtagggaatccaggacaaaactattcagttctccaaagtttgttctaaattccattcccttctgactgccacgttttccattccacattgggatagctacaccgacaataagataagctgccagtgcaagcagacctgccaaccagtgatatcttccaataaaaatcaccataatgatagaagtcaatgttgcaatcgcaatcggcgaaatggtatgtgcatagaacacttccagtaattcaatatcggttgtaataatggaaatcaagtttcctttatctcgtccttccagcttcgccggacagagctttcgtaaggcagcaaacactttgtggcggataattgccaacagcttaaatgcaataaaatgattacaatactgttccatataatgtaggattccacgaagcactgcaattacgatcatgactgttataatcgtttttaccggggtaattaccagccacatattgtccactggaacaatcattccggctacccctgtcagaagtccatgtatgatgacctgccctgccagtatcgtcaggaagattgcacacaaataacccaatgttccaagaatgattgctgccagcatgatatgaagcaggggttttaccagaccaatcagacttcccataatctggagggcacttctgcgttttgttgtattcgtattttcactcattatgccacttctccttttccatagttttccaatgccatctgactttcatacagatgtctgtacgcaccattctggctcatcagttcttcatgctttccgctttccttgatttctccgtcttttaagaaataaatcttatcagacttcacaacatttgccagtctatgggaaatcagaagcaccgtctttgtctttgcctgatcatgaatcacattcatgatcagttcttcactttccacatcgatattagatgcagcttcatcaaaaatgtaaaccttgctgtcttcttttaataaagctcttgcaatcaccagtctctgacactgaccgccggacaggttacttgctttttccagcaactgtgtctgcaagccatcctgtgtctgtaagaaccctaagagattgactttctgaagaacagcttccatctcttctttcgttgcgtccggttttgccatcttcagattttcttctactgtacctttgaacagataactgttatggcgaaccagaacaaccctctgcatcagatttgtttcattcacttcgttaagcggtacaccaccgatggtgatttctccgctgtatccccggttctttgctgcaagcattccagcgattgtactcttaccacatccggattcaccaaccagtgatacaaaacttcctgccggaagatttaaattgattccttttagaatctctctgtcctcttcataagaaaaatgaacatcttttaatgtaatatctaacgctccgtccggcagtgttttttctcctgcctgtggttccggtaaatctaaaatcttgaaaatcttatcactcgctgccataccattcattgcgatatgaaagaacgaaccaagcagcctgagcggcaggaaaaactcgctggcaagcagaacgatacataatgttcctgctacactaatatttccctttaagaattcagatacagccactgccataccgatcgttgctccaccatatgccacaatatccatcacactggtggaattaagctgcatggtcagaactttcatcgtaatcctacggaagttctgggattccacatccatctcgtctgctttctgctggtctgcctgatagattttcagtgtagtaagtccctgtaaattctcaaggaacgaatcccccagtccggtatagatactccaatagttatttaataatctcttcgccactttctgtacgactacaattgaaattggaatcagcggtacacagaccagcaggatgacacttgctttcagactcactctacaaagaatgataaacaaggtcagcggtgcgatcaggctgtaaaataactgtgggagatattttccaaagtatgtctccaactgctccacaccttcggttgacacctgtacgacctccgaagaggatacttgctcactgtaggaagctcccagcttcaacattttctcataaatcttttcgcgcagaatccgtttcacatccacgcacgccagataagaagactttgctcccatccgttcgcatacaaaacgaatcacaacgaccaggactaagatcattatggtccgttcaatgatcggtacggttactgcctggtacactacacgttccagtaaatctgcgatagtaaaaaccgctaacacttgtgacaggagagctgcccactgccacaaaatcgtatacacgatatacttttttgcgtgggacaacagccccaccagtcttgttttaatcataagtaactcctttattataattgtaagaattttttctagacaaatttatacgacttaaattataatgcggtcagagaaatgaagtttactaccgtacaacattattgttcaagtggcttgttcgtttctttttttgttctttttatttcctactgcatatcaaatgccatactgcaagcaccggatgatacaacagcatccgtggtcctgaaaaccgcataacctgcctgatctgttctctcatctccggcttataacaatgcaccttacaattcgcacaaaacgtcttttcttccataaatggacacttttgacttctttgttttgcataatccgaaagtctttgacattctggacacatctgcccctcctatctttcttctttcggatgtttttttcggcaatacagccgaatcatctcttccacgacatactgttctttttgtcgtttcttttctactttgtccatctcactctcctgtttctgccattttgacttctggattttctgtcttaactcttaagaagaagtataacaaatgacatacccaaaccactgcgatacagattcttccaatcggtacattcttcatgcagataaaaccaatcaacataactgctgttaccattccgataatcttgcattttgttcccatggtcatagctcttttctgaacaaaactatctagatgtttcttatataaattcgttcctatgaaccagtcgtgcaatttcttagaactctttgcaaagcaaaatagtgttgccatataaaacggaacggttggcaggataggaagtacaattcctatcgtaccaagtcccaggcaaagaaatccaagcacaatccatactatttttaaaggattttttctcgttttatttttcttctccatactcctctcctttatcacttattttcatctgtatttataagataatgatggtcatttccgaacacgcaaggttagtttcttccatttgttgttagttatgactattatcctgttaaaatatatattatgctctttctgactgtcaatatttttccacttatttcgtacccttaagtacgaaatcttcatgttctaatctccttataaatacgttatttttcatactatttgataatttttatcaatattttttttctttttacttgttaataaattgtaaaacagcggcattataccataaaaaaagaagtactatatgctcctgattttacatacattacttcttttaaaacatatttattaaatctattatctgttaacctctcgcatttttaacacttacagcttaaaaatcaatcgtgctgtactctctggcatatgtgcttctccaaccgaactggacacagtaatcaaaagatttccacgtaacgttccatggtcaaaattctgaaaaccacatgcattcaaaggtatttttatccttccgttctttacatctgcaattttatacatatccccttgcaaatatttcagacaggtaagatgccctttcatctgttttccattaatccgagataccgcatgcatttctctgattgtcaattcgagataacagcctcttttgttacgtttcacaatcccgagaggttcgaatccattttctgccatggatcgacgactcccatctgtctgcaggatagaaatcacaactggatgattgccatactccacaagttcttctatgtttctaatctgattctgttctttttgcatttgaatttctttattgattcgcatatggctttttgtaagttcttccagtcttctgtaatcaatattttcgatcattcctttcagaacatcatcgattccttctgtaatcccactgcgttccagatactccctaacgtctttttggactttctgatgccaacggagcatctttttccctttatccgtgaattcaagactttcggtcagatatcctttttctatacaacttttaaagaatcggcttactgttggatgttttacgccacattttgcagcaactgcaccaattgtccctcttcccttttccagttgttccaattctgtcagatactgaatttgtaatactgtcagatgattaatttctactgtctggttcctggtcatgactcaattcctctaccatatttccacttctagttgtccacagtcccacacttccggttctgtctgattctccggcataaatgcaatcagaagttttccctcaatcactctgtcattcggctttataataaattcaaagactctggatggaatctgttctccttgtgctccttgttcagctaaaacccactgtttatcatagttcttataccataatcttttgtttcccagactgctcactttctgtaatttaaaataacccttttttgttatttcaaaaattacattcctggaataacaatgatattccttctttaattttctaggacagcgttgctccagactatacatctgcattgaaaaaatatagtttcctttttcataacggtctgtcagttctgaatttcttattcttctctcatagtacatgttttcataattgataaactggcagattgctctcgtagattcatcggttacaatgtgttcaatccgacatgcatcctggtctgccgtcttttcatttacaccaataaactgtaacatctgactgattgaattatgccggtaaatacaatcatttcctacagatagcccataatctgtcaattgtatctcctgtcctgcaattattttttcaagatatccttccttttgcatcctcttgagacacaccactatatctcttttctccattctgaaatgctgacagattcgttccagatctaatgagatattctgtgtcttccagatacacaactgctctaagatatcctcttctttctctgattttgaatgtggaaaattatgtttttcagtacttgtatccattttttctcctatcacactcccctttttaccctaccagcgattttatatcttgtcaattcattttaaggatgaaacacataatgatccagtctttcaaatgcttcctgtactttcgatgaagctacaaaaaacggactatgatcattcaaaaccgaggacaggtatatgatgaattaagtattatgtatgaaaaacgcctacctaaaaaggcaataaatttcaatttaaaaacaggcgggggctccgcctgctattttataagtgaacattttcctcttttactctgcaactttaaaactcttcaatattttaaccacatctctttcttcacccgcagtaaaggttccatctggtgcctctgcaatgaatgcatatggtgttggatagtcaaaagaaaattcatctacattcccagcttgtcctacaaattctcttgttccaagataagattctggaacaactgcataaaatgtagttcctgaatctacgggagtaaaatctgaatctctcttcatatccaattcgccaataatatgtactttcgctacaataaaattgcctaatgatgagaagtctgtatttgttccatttggaaaactcggaacgaattctgaatcatccgcttttgttatatccgcttgtaacatagacacaccagaccttcctcccaatttgtgtactagagaccaaaatgtaactgtaacaccgcgctcattagataacacaaccttttccataatttcatcatttggttcccctatttcttcgctttcaacgttccatcctaaaggaattttaaattgaaactcttgcgcatcaacattatatgtttccccatatctggttttatataagttccactgctccccggtatcagaataattcaaatcatcgtctggattccagctggatttccactctttttcccaaattgccggtaaatctttattgaaaatttccacctccataagttcctctgatacaagtggaaggtcaacaacaagctttcctgtaagattaggaacaatactcagatttactgttcctgcatagtattgatcctctcgattagacaaactcacctcacctgatgcatttccaaagattccagctgagatatcacctccacatgttccatatatctttgtaattaaatgaatatctattcctgcggaggcatcgccttttgctgatgcaatagttgaccactcaattccatctgaaatatctttctgctcttttggatctttaatctctttcactttatttgtcttactatcatatataaatccaacagtctgttcatctaaccaggaaagtgacatattccaatttccctcaattccaatctttcctgtaagatttgattctaattgattcgttataacaatcggtactcctgccacgacaaaagtataattaggtaattttttttcaaacagttgcttctcatgctctttactcatactttctttcaaatcaactgaaagatttgcccccgctttcctatacatcgccatgccatatttgatatttccatgattaatatctaacatcaattcaacttcaagatcaactcccatatcacctgaaatcgtaacatcatctatcgtttcctcaaaagcttttccaaaatcatactcactttctggttcttctttctctggatcttcgttatcactttctttcgatttcgaatcatcctgagtctcttcgctactgccttcttttaactttgaatcatttcgagtctttttgtcatcatcttcttttgactttgaatccttttgagtctttttgtcactatcttcttttgacttcgaatcatcttgagtttctgtgccatctgatgaactactatcttttttcttatctgccatctctatcacagaataattcttttccattttagcggacatcatctgtactgtctctacagctttatcagtatcttttttgctcacattattagatacttcttgcactccatcttttgttaattttagtcttttttcaatatatgctttttcaaacacatctgttagaagagctgactgcgtttctactacataccctccagttgcttttttaactgacactacttttcttataaatccattttcagctccactaatctcacctgcaacaattacgtctccttctttgtatttcggatttgattcaaagacaaggttatcatcattcacatttatcggtttctttttcttatccatatctgaagtaatgacttttacattttcttttacaataacatctccctcttgtttttgtttcttatccttatataatttttgatatcctaataccgacaccattacaataacaatcaatattagaataataaatattatcctttgtatccactttttcaactcatcttctccttcagatttttaactttatctacttgtttatattaaatatatctccacattgtccccttccattcagctttgagctatccacataatagattgctaaaatatcctgtttttcaacagaaagtggacgatctggcttcgaaatccaatcccctgcttttaattttaattgcattgtatctttgtcaaatgttccttctactttataacttccagaatttacatatgatttatccgaagtatatgtataagtaccagaataatttatcccatcttccgagttaatatctagctctgctgttccagaagatcctgctcctgtataatttcctttccaagttccactcaaattaattgaatccgtatctaacacaggagtaattgttacacttggatcattccatgttccatcataataataaaaatactttacttgaagagtatattgcacatctgcttttgacaatttgcaactgcattcatatgttacgccttttcctttctcttcttttgtctgttgattgattgtgaattctgatatatcatctgtatttatctttattttctgttgtgtcgaataatcaataaaagaaattccattaccaacatctgattttgtttctccaactgatatctctcttcctgaaagttcagcaatcaaatcttctttattaacacttaaagctttatctgctttttccttcgatgaaaaatcattctcgtcttccatatcttttaattcccattttttatcaaaatcatattctgctttgattgtaccttcaacttcttccacttctccatttagttttatcttaatagtcactttatctttccctttatctaaatctgtatcttgtttttttataacaatatcggaaatttctccatcttcgattgtccacaactcaccatcaacatttattgtcttgtaagctaaagaattcttaatctgttcttcattaaccccctttaatggttttataacccaatcagcactttcgcctataataatagactgcatcttccatccattatcaaatttatgatatgacaatgtatatcctttttcataagaaacattgtctaattctgtttttacgatacatatcacttgatcacttttagcttttttgtccgtttttctatccttgatttcaatatcaactactttttcattctcagctaatgcgagtgaggaacttgcatccattatatcttgtttgatttgtttttccttgggtactgacgaacaccctgtcatacacaacataatgaacactagcattaataatagcgatgttttctttttcatattattcttctccctttcgtaaataaaatcgcctttgacatctagtaggtgtcattttttgttttattttatcatatactttttaaattgacaattagtgaatgtcatttttagaaaggagtttatctatgtataaaaataaatcttcaactggatttaataatatttgtggacaaaaaattaaagaattgcgtttacaacttcccgaaaaaacctctcagcgcaaatttgcagatatgcttcaaatacacgggcttgatgtagacaaaaatgctattcaaagaattgaatctggacaacgttttgttactgatattgaattgaaagctattgcttctgtcttaaatgtaagttgtgatacattactgaacagtaatttttcttaatcctaaaaggtgactgttgtaaagatggactaatagcccacgtgaccattatatttaccagaatatgtgttgctcaatggaacaaagacaaagtaaatacctgagaactcttggtgaacagttctccttccttgttaataaaatgacagaaatcactttcagcaaattatttggcatcctaatggatgccttaatgaaaatcttaaaaaattatatattttatacgcttttatcaattatccaatcaaatattttcagttttattgtatatatacttttaaacacaatcaaatctataacaaaaatcatcaccaaacatataagatacataaagattcctgctaaataatttcctagaattccagcaattaaagaactacccttttgaactatatttacacctgttaataaagatgatttattcatatataacagccagataaaaaatggcaatgacttaacaagaatatcaactatcatatttaatatttcatacaaaaatcgactcttctttcttaaatgtaacaagcttcttgccataacttgtatttggtattttactatcgttttctcatcatttatagaagtataatgtaaatagcccatatcccaatattcctgtaaaactttaccattcaattgaatgaattcatttatatatttttcacatgtatctccttttctgactaaatattcttctatagttgggaactcttttggatttagcctataatactttaatatatagaaatcattcaagaaacatctgcgcaaatgttttttatagctcttgggatctataattctatgtatataatctcccatatatttttttgaatattcgtcttttttttctggatgtccttttaaaataaatcttttttcagattcactatatataataaagattccgaaataattatagattgctgtacttccctcgacctctatatcattttctatctgtaaatatttttttactgtaattccttgttctaataattcaatatttcttcttaattgttcattctgtctttcataatttttttccataattattaccactcctcatataatcaaatgttcttattgaagattcaaggttttctggtctctcatatctcagagaatgagtcgcagttatgagcattttgatatatcaggtactgaaatagtgattaaaaggtatacgaaataaagcggctattgtaaatatttttcagctaattctaatgaataatttttatatctattatatgcttcatacaatttgttttcttcaattaaattgcaacatggcagtactaactcataatacatttttaggaacacatctacattatctttcagccctttcactttctctacaattttgggcgcaatcacataatatttctctatgtcctgcggataattctctttaacatatgaatcccgaaaatttcttaaaagttcaagttcatcacaatcatctagaaattcttctccttttacactcatgcaagctgacgttaaatagcatccaccgctactattgctttttcctgtcgcatccttatacaacggacatttgtgataatctgatgataagaaattagctccgcaataatctgcataccgtttctgtatcggtgccccatcttttccaccacttgctttacacttattaccattccacattgattcttcaaaaaacggacatattgccatagtctccactctcctttttatgttttgacatttagtgaatgtcattttattttagcatatttattttcaaataacaattaaaataaattaaattacagtaaaaattatttcttctattgtttaattcttctttttccatttcatgacaaaaaattacagccagacttcaaaagtctggctgatagtataaaatataaacatgtccactatattatacaaaaattccgtcgaacagttatctgtcagaatctttacattcattcttattctgttgggaacattgctacttccacccctatcacacaatccatctcctgataatctgccggacagctgtctgtcagaatctttgcattcgcaaaagcagaaaatgtcactgaactgatacatccgaattttgaatgatctgcaaggacaaacctgttcctgcatctctcgatcgccgtttgtttcaccagagcctcattcgcatccggtgtcgtgaatccttctgcttttgtgattccatttgctccaaagaatcctttggtaaaatgatattcctgcagattcttcattgcctgggcaccgatcactgcctctgtagagttcttaagttctccgccgatcagaaacactttgattcctttagctgccagtctctgtgcatgtgaaacagcatttgtcacaaaaactgcattggtatgtccaagagcatcaatcatataacctgtcgttgttcctgcatcgagataaataaaatcttcctcctcgatcagttctgccgcatattgcgcgattttccgtttctcttccacatggagttcgctcttctgctcaactgtcggttcataagcagagacagtgccttcatcttctagcgcaaccgctccgccaaataccttgataagctttccggctttatgaagtgcagtaatatctcttcttaccgtagactctgatgtgtctaagatctctttcagttctgtcgccgtaacacttttcttttctttcagcaaatccaaaataatctgatatctctgttctgtaagcatttttattatctccttttaaaaaaggacctgaagccatgaatctcaagcgcctgcttcttgatccatgactcccggtcctgattcttatattcttgtaactgttcagagccaacctccaaaatgctacgcatttcgtcggtgtgtcgtatccgccaaataaaatttcaaaaacagtcttaaaaattcaagcattttacacctgttttttgaaattttgcttggctctgaacagttacatattcttttcaatggttttgacagattattctattcggcatttcatccaaatatttgttactttatgcaactttcttcttaagcaatccaagcagtactgcggagatgactgttcctactacgagggaaacaagatacattactgcatttccaacaaccgggaatacgaagattccaccatgtggtgccatcagtgtacatccaaacagcattgacattccaccggcaattgctgaaccgatgatacaagatggaagtacatgcagcggatcagatgctgcaaatgggattgctccttctgtgataaatgcaagacccatgataaagtttgtcggacctgcatctctttcttcttttgtaaacttatccttaaacagcagtgtggaaagggcgatggcacatggcggaaccattcctgcaaccataactgctgccataatatcataattaccagctgcgattgatgctgtaccgaatacataagctgccttgttgaatggaccacccatatcgatggacatcattcctccaagaatcagtcctaatactactttacttgaatctcccatacctgtcaatgcattattcaggcctgtgttaattccacccatgattggctcgattacaaacatcatagcaagtccgatcagaagaacaccgatcaatggataaataagtaccggcgcgattttttccagtgcatccggaagcttgtcgcatactttacgaagaagtacaatgatatatcctgcaaggaatccggctacaagagctccgaggaatccagattttccgcttgctgccatcataccgcctacaagaccaactgcaagcgccggtcggtcaccgattgccattgcgataaatcctgcaagtaccggaagcatgaatccaaatgctgttccaccgatctgtttaaatactgctgctaccggagtgatcataccaaaatttgctctctggtcagccggaagtgcattcagatctacgcacaatccgtcaatcagaaatgcgatcgcgatcagaataccaccaccaacaacaagtggaagcatatgggaaacaccgttcattaactgcatgtaaatctgatgtccgactccgccgcttttctttcctgcggaagaagatgctgcagccggattgtttccgtggaagaccggaacatttccggctttcgcctgagctaccagttcatctgctttactgattccgtctgatacctgacagatgattactttctttccgtcaaaacgatccatcggaacctgtgtgtctgctgcaacgataatacaatccgcatcagcaatttcctggtctgtcagcacatttttcgctccaccgcttcctcttgtctcgattttcacgaaacagtcggcagcttttgctgctttctcgattccttctgctgccatatatgtgtgtgcgatacctgtcggacatgctgttactgcaagaatcttaaaatcactctctgcatttcctgtatctgccagttgctcatcaatgtcagctctctcatcatctgctttatcaataatagaaaggaattcctccgcagaggttgcatttctcagagcttctgtaaactgctcatccatcagcatcattgacaatttactaagtacttccagatgaacattatcctctgtattcggtgccgcaatcaggaataaaagtgttaccggatctccatccagagaatcgaaatcaacaccatttttaatgaccattgctgcaagtcccggcttgcttacgcaatcaccttttccatgtggaatagcaattccctcaccaattcctgttgtgctttcctcttctcttaagtaaacctgctttctgtaggcttctgtgtcattgatcttgccgcttgcacacatcaaatccacggccatatccaaagtttcctgcttattcgccggattcttgtcaaaggcaatgcttcttttatcgagcaaatctgtaatcctcatcctaccgctcctcctttacaacctgttgatatactccggcaatctcctcttttgttgccagattctctgaaaatgcacttgcacttcctgatgcaactcccatgtggaatgcatgtctgtattcatgtttctccatccagcctgccataaatccggctaccatagagtctcctgctccaacaccgttttttaattcccctttcggcgccggagtgtcataaacacttccatcttctgctacaagaacggcaccttctcctgccatggatacaagaacatttcttgctcctttttcctgcagtttctttgcatatggtacaacagattctcttgtcaaaagttccacatcaaaaatctctccaagttcatgattgttcggttttattaaaaatggatgatattcaagaacgttcaacagcagatctctcgttgcgtctacaacgatcatgacacctttgccatcaagcttcgccataatcttctgatacatgtcatccggcatagaagtcggaatgcttcctgccaggaataagacatcaccttctccaagtttgtcaagcttctccatcagcttctctacatcttccggagaaatcaccggtccacttccgttaatctctgttccgtcgattgattttaacttcaggttgattcgagatacaccttcattgatctcaataaaatcagatgcaactcccatctctttgagtcttctttcaatctcttttccggtaaatccggctaaaaatccaagtgcagtattctcgataccaagattaccaagcactgtagaaacattaatgccctttccaccgggaaggatcagctctgaactcgttcgattcgtaagtccaagcttaaagtcctcaacagagacaatgtaatccaatgacggattaaatgttactgtgtaaatcattttgcattctccttctctctgaccattgtttttctttatgcttgtattatacgttcaaactcgttcatagtcaatcaaactaatcaacaaatttcatgactgtttttggttgattttgcacaattttggttttcagcctttaaaacaagaactccgccagcacacaattgctgacatccatcccccgatgcgtcagtctgattcgatctccactaaattccagcaattgttcttcttctaatttatcaagaatttttccataaacatcatccacattctttccaaaacagttctgaaaatctgttctcgaaactccctctacttttcgaagccccagatacatgaactcttccatctgcgattccacggaaagaatttctctgtcaataagaatcgactcgccatttctaatcttttcaatatatgctttccgatctcgaatatgatcaaaccgctctcctttgatcaatgaggaggctcctgctccaatcccaaggtattccgttctgtcccagtatcccagattatgtctgcattcttttcccggctttgcataattggaaatctcatatcgatgcattccggcttctgcgaatcttagtattgtcaactctcccatcgcatattcttcttcctcagatggaagtttccatgcaccacgatctaactttcctttttcataccaatcatagaatacagtaccttcctctaagattagactatatgcggatatatgttccggctcaagtgccagaacttttgaaagtgtatcttcgtagctttctatcgtctgtcccggaagtgcggacatgaggtctatgttccggtttttgaatccagcctgttctatcagtttccaagtctcaaggaattcttcaaatgtatggattcttcctagcattttcagttcttcattttgtgccgactgaagtccaatactcagtctgttcacccctgctgctttcatggcatgaagtttctcgatatcaactgttcccggattcatttccattgtgatctctgcattctcatttactgaaaatgtatgataaattgcattaaaaatctgttctatctgttccggtgtcagaagagacggtgttccgcctcccaggaaaatggtctgaacttcatactctccagataattcctgataactctgaatctcctgaaccatagcactgacataagctgcctgttcttcctctgttccacttgctgaaaaaaaatcacaataattacattttcttacgcagaacggaatatggagatataattctaaatttctctttttcatctttaaatacagaaagatactgtctgataaaaacagtatcttttccttccttcttttatctagttctcatccagcttcaggacactcatgaatgcactttgtggaatctctacatttccaacctgacgcattctcttctttccttctttctgcttttcaagcagtttcttcttacgtgaaatatcaccgccgtaacatttcgcaagaacgtccttacgcattgccttaactgtctctctcgcaataatcttacttccgactgctgcctggatcggaatctcgaaaagctgtcttggaatctcttctttcagcttctcgcacatctttcttccacgctcataagcgcttccttcgaatacaataaaggaaagagcatccacttcttctttgttgatcaggatgtcaagtttgacaagctcggaacgtacataaccaagcatctcataatcaaaagatgcgtatcctctggatcttgatttcaatgcatcaaagaaatcataaataatctcgttgagtggcagatgatatgtcaacacggctcttgtctcttcaatatattccattccctgatagattccacggcgttcctgacacagatccatgatcgctccgatgtactcggatgtcaccatgatctctgcctttaccataggctcttccatatattcaatctctgcaggatccggcatgtttgtcgggtttgtcagatcgatcacatcaccgtttgtcttatggatcttgtaaataacactcggtgctgttgtaacaagatcaaggttgtactctctttccagacgttcctgaatgatctccagatgaaggagtcccaagaatccacaacggaatccgaatccaagtgctaccgatgtctctgcctcaaactgaagcgcagcatcattaagctgcagtttctcaagtgcatctctcaagtccggatactttgctccgtctgccggataaagtccgcaatataccatcggatttactttcttatatcccggaagtggttctgcacaaggattctctgcattcgtgatcgtatctccgacacgggtatcctttacattcttaagactggctgtgatatatcctaccattcctgcttcaagtgcgtcacatggaatgaactgtcccgctccaaaagttccaacttctactacttctgctttcgctcctgttgccatcataagcatcggtgtaccttttttgaccgtaccttccttgatacggcaaaatacaataactcccttgtaagaatcgtacttggaatcaaagatcagtgcctgaagcggtgcattcggatctccgaccggtgacggaatctgctgtacaatctgctcgagaacttcatgtacattcagtcctgttttagcagaaatcagtggtgcattctccgcatcgattccgatcacatcttctatctcttcttttacacgctccggctctgcgcttggtagatcaatcttgttgataaccggcataacatccagatcatgatccagtgcaagatatacattcgcaagcgtctgtgcctcaactccctgtgctgcatcaacaacaagaattgctccatcacaggctgccagacttcgggatacctcatagttgaaatcgacgtgtccaggtgtatcgatcaagttgaaaatatactcttctccgtcatctgcctgatatacagtacggactgcctgtgctttgatcgtgattccacgctctctctccagatccatgttatcgagaacctgtgactgcatttctctgctagtcaaaagtcctgtctgctcaatgatacgatccgccagtgtagacttaccgtgatcgatatgtgctataatacaaaaatttctaatatgactctgatcaattgttgacaatacttcttacctccatctatctttctgactgttttacaataaaaagttctaccgcaagattgtctgtcagcaatcctgtctttacatcctgctccaactgtgccccttcttccatcacacggcgcagctgtcccatcttaaaccgcttcgcctgttccatgttctttcctgccacaaatggatgtaagcctgctttagacgcaatctcttttcttccatacccctggtttgcaagtgccttgacatggaaaagcatcctgtactgacgcaccagcagaaaaagaatacgcatcggcggttcttttaaagccagcagttcataatacagatccagtgctttctgctgatttccggctgcaaccgcatctaccatctcgaaaatatgattcgtaatctgcgtcacacagacagcatcaatatcttccttcgtgatcgtatcccgctccagtgcataacagaatactttctccaactctccctggatattttccatatctgttccaactttatccagaaaatacacaatcacagactccgaaatctgcttctgctcttttcggaccagacctgcaacccagcgtttcaaagttcctgcatcctgcgtggacagctctgcaatatatccttttgatttcactgctttatagagcttatttctcttatcaatctcttcttccacaaagataaaacaggttgtctctggcatgtccttaatataatccgccagatctgcccctgccgcagttttaaaaaatcccgtattctcaaatacgatcagtctgcgctctgcaaaaaaaggtaaggtctctgcaagatcgattgcttctttcactggcgtattcttcccttcataatacgaatagttcatcgtatcaccttccggaagcattgccttcacaaaacggttcttatactgtttcttcagatatccttcttctccgcaaagaagatatacctgcttaaattgtcctgattttaaatcttcatttaaggtcttcataactattctattataaatgaataaccaatactttgacaagagcctttttatcacctgttcctgttttataaatacttgtgaacctttatttttcgtccatcgctccttagtgtaattgcaccacattcctgcgtggacaatacttcacttccgatttcctgcaggcgttccagcgtctcctcatgtggatgtccgtagcggttttctatccccgctgagattaatgttaatctgggtttcacaatctgaagaaattcttcacttcccgaattcttcgacccatgatgtcctgcttttaagattggacagctttccaatgctccgctttccaccagctgttcctctcctcttccttccaaatctcctgtcagaagcatttgaaacgccccatccttcaattcaagtacaacagatgcttcatttcccgcttccagacgaggcatctcctcttccttgccacgaatacgctcgtttttcctcgttgtcaacggagcgatgcattttaaatacgttcctactttttctccggcataaattgtcaacactctcgtcccattttctttcgctatttctgcaagatggagtaatttctcatccatatattcttccggcggcagaacaaacgcatcgattttcactccctgtttctgattttgcagaagttcctggattccattgatgtgatccgcatcaccatgtgtcacaaaaacatactccagttttctgaccccctgcgataatagaaacggctctatccggtaagtaccgacagaagacagatcactgctccctccatccaccagcattttctttccttccctatctcttataaaaatacagtccccctgtccaacatccagaacagtcacctgaaggttttttgaatcattattgagtattccgcatccgcagattgatcctgctatgacaatacaaacaagaagtgaaaatcccgcctgttttctccggttatctgtctcatttttcattgcatgaaacaggaagcacaaaaacaacagcacaccatagtaaataagcacccaccataactctggctgtccggtcacgatcctgctgcccggaagcgctgatgtcagctcacataatttatcatagaaggacaacaggcgatcacagcttctgaatccaatttttcctacggttcccgataattctgaaaacaaaattccacctatacctgtcaacataacaaatggaaacaacggaattaaaataacattcaaaacgagtgcatacggcggcacctcaaaataataatacagcatgattcccagaagcattccattaacagctaaactaatcttaaatccttcccatgctttcaaacgtgttttctgttcaaaaattggatacaataataaaatcccaagaattgcaccaaacgaaagtaaaaatgctgcatctaacagatacagcggttgatatatgcttaaaatagctgctgtaaccgccaggcttgtaggttgatccacatctctcccggtaatttctgcccccatgcggataaaaaacataagaagtgcacgaagactggatacctgtggacctgtcataaccaaataaaaaaacagaattcctcctccggcaattccggaaaacagaaatgaatttcccattcttcttaataaccggtaaacagacattccgatcagtgacatgtgtaatcccgaaattgcaagcagatgtcctaatccgttcttctgatacaattttttcatctccggatcaagtccgctcttttctcccaacaagattgcagaaagcatcgcgccatgtgtttttcccatctggcttacaatcttccagttccagtaatttttcagccggtccagctgattccgtatgctattccatcgtgatacaatccagttcttgtctttttcagacaaaactatcttaatctgttctgcctttgttaaaaccccaacatggattccctgtttttgataataacttttttggttaaaattacccggattcctcggcggatgaaacgactgttttatcccccacacattcaacttctgtcctattttcattctgatttttttaccggatttattattttttattgttacaaggattttcttttctttgattatctgattcttactcttttgatctgtacaagaaacaaccgcatctttcagataaattgcagttgattgtgatttattttcaattctataaaccgtgccctcgcaaatcacatctttctcatccgaaatcaatgtttctgcaagggacggtttctgatcttttgtattctgtaaaaaactcactcttacaagctgtatggcaatcagtataagacataccatacagagcgggcgttttctcattctttgttatctgctgctatccagtcctgctcttcattcaatggctgtgacaagtccaccttctccatgtattttgcattcgattcaccattgatcgtaatctgtacctgccttactcctgctccctctacaagagaatccacaatagaataaatcgtgatctcaggcagtacatcatacgcactgatcagaaatgtgctgtcaaaattcacataacagattccatcctttgtcgttacactcaacagattagccgccggattgatcgttggatatgccccctcctcagatgggccttgcatcagcttttctacaatcagtttttctttcaagacattactgctgtaatgaacgtccacctcttgtttgaccagtttggatccattctgatctgcaaaatataacttcaatgtatcactctgataagaacttaacgaagaacctgtcgtgtcaacaatatcgtcctcattcatcagaccgacctcatttccttcatcgtctttgagtggttctccttccacacggacagataccgcatcaattccgtcaatctgaagcagtgactgcacaattgctgcccgcatcagtttctcatctaaggatttcacttcataatattcttcgctgaaattaatctcaaggatactgccctttaaagcacagtcgagcaatttcacctgttccggaattgcctgtgtatattcaatttcattcgttggtttcttcatctcatcgattacagattccgccctttttatcgcagaattgccgctgatcttagctgcaacctttacaagtcctgtcttatctgtattcatacagtaaatgtaagattcgcctttctttactccataacgatccccacacgcagttactgcgagagaaagaatcagaataagcaacactgcgatcccttttctttttttcataacttttctcctaagaagctgtatagatcaatggaattctcacagtaaatgttgttccttcgccttcttcactgaatactttgatcgcacctctatgtgcaatcacagcatttcgcgcaattgcaagtccaagtcctgttcctccgatttctctggaatgagatttatccacacggaagaaacgttcaaaaacatgcgcctgatcctctttcggaattccaattcctgaatcttctacttttacatagaaaaatttgtggtctgcattcaatgatacatgaacccatccattatcatgattatactttactgcattttctaccagattggaaatcgcaagtgacagctttgtctcatcaatctccgccgtaaccggacgaaagctctccattacgatctccacattctttttttctgcaattggttttaatctcttcaaaatctgttccagaagttcattgatattaatggattcaatattcagcgtctgccccttcttgtccatcttcacaagtgataaaagatctgtaatgatcttattctcacggtcaatctcttttgcaatatcacccatgaattcctgatacatctcaaccggaaggttctcctgctccagaagtgaatcggccagtactttcatcgatgtcatcggagtcttcagttcgtgagatacattggatacaaattcttccctggaatcatccaaaagcttcagccttcccatcatcttattaattgcttcactgatacttttcgtttctgtaaatgtatccacatgcaaaacatcgtcgctataccctgcacttacattctcgatcgtagctgcaatctgatgcagcggacgtactacacgatctgctgcaaacactgcaacaatcgtcagaaaaatcatcacaagaccaataatcacgcttccctgtgtgtataatacatccagagaatcctcaatactatcggttgaaacacttgccagcattacaccgcgaatctgatcctctccgggtattgcaatcggtgcagtcacctcgatataatgattcttcttatcataattattcgtgctcgtccccttcatacagcgcactacactttcagatacatccagctttccctcatccagactgtaagtatccttgactaccctcagctgatcgtcaattaccataactcttccgttataaatgttagtcagctgattcaggctgtcattgaccacctcttgtgaagtgtcctcaaaatagtggctcgcactgatctgattcgttaaaattgtacattgattttgaatttctgctgttcgaagtgacacagcacgtgactcatagacttttacgattccaaatagtgctactacgctgggcacaagcccggcaagaagcaccataataaaaattcggaatctaagattgttaaagatctttttcttaaatgaaaatgtattcttacccctggaaataataacccactccccacttcgtatgtacgtattttggttcacttggattctgttctatcttctctcgtaaacgacggatatgtacatctacagttcttgcatcacccggataatcatatccccagatcagattcagcagattctctctgctgtaaaccttattcggattcattgccagaagctcaagcacatcaaattccttcgctgtaagattgatctcacgttccccgatgaaaacacggcggccttcgcaatcaatcttcatattccctttcacaagcaccggactgccggccggctcttccttgcgtttcgctgttctgcgcatgattgccttgattcttgccttcacttcaagaatattgaacggctttgtgatataatcatccgcaccatattccaaaccaaggatcttatccatatcctcactcttggcagtcaacataacaatcggcatatctgaaaattcacgaatctgctgacatacctggaaaccatccagtttcggaagcatgacatcaagaagtacaagatcatactcacatcttctcgcatattctaatgcttcttctccatcataagcgcaatccacttccattccttcctgttccagactgaaccgaatcccctttacgattaatttttcatcatcaacaactaatatcttcttgctcatactcctctttctggccgttcttctgcctgcccgctcctataccgtaatatcgtcttttatcttattaaacacgccatccttgattccctcgatcttcttgagatcctctatactctgaaagtttccatgctcctgtctgtatttcagaatactctctgcctttgatgctccgattccactcaaggtcatcaattcttcttttgcggctgtatttatattaattttatcactgactgatccacctgcatttccattcggatctgcccactgaccggaaacagattgtgctgactcctctgcttcttcctgcgttggcacatagatccgctctccatcactcaaagcttctgcctgattgatccaatctgcagcagcatcttctgtcattccaccggccgcttccaatgcttcgtaaatccgtgcatctgtcctcagttcgtacacccccggagcattcacagctccacatacatgaacatataacgtctccggcagtccttcttctgcatctgtgccaccctgagatcctttttctgactctgttttggaatttgaggaattcttctctacatcagattctccctccagtgtgaactcttcaagttcttccgctgcgtcatgcttctctgcacagccacacaatcccatggtcaaaaaagccaaagttaaagtcaatacaattccttttagcatctgccctttacggcatctgcatattttcttccatccgttcttcatcctattgcctcactgttctcagacagtcagacttccccttaaaaccggacataaatattgtaacgaatttttctcaaaaatacaatagacaatttaacgctttgttacagacttgttacaatacccgcaaaactttctatttccattggaaaagaacaattccaccggctgcgatcaacaatccaatcagttttctccatgaaaatggttctttttccattccaaacattccggatagtgagatcagataagcaaccgccagctgggaaacaacaatgaaaagtgctgatcttgcaggtcccagagcatccacacttttaatgacagtccatgtgatccctgctccgatcacacctcccagcaacatatagcgcggctggacttccataagtgctgcaacagagtctcttccagttgccagccagacaagcaggcacaaaaaaaatgctgaaagttgcacccacccattgcttacccagattcctgtcgtctttgtcacctgcgcgttgaacactccctgtacactcatcagcgcacctgatagcagtgcaatcaaaaaaccggccataagctcatacctccctatagaaatagtataagcaaatgccggcttttttatgtataagatttcttatgcaagtgcacgtttcagtttttcgatcatctcatcaatatgcttttcttctacgatcagcggtggaacaaaacggatcacatttccctgagcctgaataatcagaagtccttcttcaattgtctttttatttacttctgcaagaggttttgtaatctcgattccctgcatcagaccttttccttttcttttgacaacacagtccagctcatccacaagctcatccagtttttttgtcagatatggagcaacctgatttacatgtcctacaatatcttcacgttcaaaaatctcgatcactgtcttaacagctgtacatgccagtggatttcctccataagttgcgccgtgatctcccggctgaagagaatattttgccacttcttccgtcattgcaaatgcaccgaccggaattccgtttccgattgctttcgccatagtcagaatatccggttttacaccaaatccctgccatgcaaacatatttccggttcttcccattccacactgcacttcatcacagatcatcaggattccattttcatcacagattttacggattccttccataaattcctgtgttgcaagattgattcccccttcgccctgcagcggttccaaaataattgcacaagtcttatcatttaccagtgctttcacactgtcaagatcattaaactctgcaaatcttacacctggaacaaccggctcaaacggttcacgataagaatcatgtcctgtcacagaaactgctccgaagcttcttccatggaaagaattctgcatcgctataaattcatatcttcctgtcttctttgtgtaagcatatcttcttgccgctttcagagcaccttcatttgcctctccgccactgtttgtaaagaaaactctgtccattccggaaatgcggtttaattcttttgctgcctctccacagctctcgtgaaaataaagatttgatgtatggtataacttatcaatctgatcttttaatgcctgattcagttctttattatcatatccaagtccagacacagcaaatcctgctgcaaagtcaagatattcttttccttctgtatcatacagatacattccttctccgtgatccagtgcaatcggaaatcgattgtatacatggatcagattctcttctgccgcctgtattttactgttcaccatcataatacctgctttctttctgatttaaaattgctgtaccgattcctttgtttgtaaagatttcaagcaacagacaatgtgggattcttccatccagaatatgaacacgggatacaccactttcaatcgcatcaatacaattctgaagctttggaagcattccacctccaatatatccgtcagcaatcaattccttggcttctttgacctctaattcagaaatcaatgtagaaggatcttttggatctttataaacaccttcaatatctgtcaggaatgcaagcttctcaactttcattgcacgggcgattgcgcaagctgcatcatcagcattgatattataagtattgtattcctcatccataccaaccgggcaaatgattggaaggaaatctttttccagaaggtcatacaaaatctctgcatttactttcttgacatctcctacgaatccgatatcctgtccgtctgaaaacttcttctcaacctggagaagatttccatcctttccactgattccgatcgcacgcacgccaagactctctacaagctgtacaagactcttattcacgcgtcccagaaccatctcagcaatctccattgtctctgcatctgtcactcgaagtccgttgataaattctgcttcttttccgacttttccaacccacttgctgatttccttaccaccgccatgcacgatgatcggtttgaatccacacagtttcagaagtgtaacatcctcgattactctgcgtttcagactttcatccaccatggcacttccgccatattttactacgatgattttacggttaaagcgctggatataaggcagtgcctcgatcagcacctgcgctttatccagatatttctgcatattgcttgtcattttttctgtctcccttttttatcttttcagcgtctttaaagaaataataatttctctataaatcaacttctgtaatccgcattgatatcaatgtatccatgtgtcaggtcacagccccacgcagtagcttctgcatctccggcttttaagtcagcaatggctgtcactttttcctgtgaaaggatctctgttgccttttcttcgctataatctgttgctgttccattagcaatgatctgaagctttcctgcacagctctcaaagaaaagatctacctgctccggatcaaactgcgctccggaatatcccattgcacaaaggattcttccccagtttgcatcgtgtcctgcgattgcagcctttgtaagattcgagcatacaacagattttgcaagaacttttgcctgctcttttgtctgtgctccgacaacctttacttcaaaaagtgctgttgcaccttctccgtctcccgccattgccttcgcaagtgtctcatttacataatgaagagcctctttgaacgcatcgaattccggtgtgccttctttgatcttctcatttccggccattccattcgcgagaagaagtgctgtatcatttgttgaagtatctccgtcaacagagatcatgttataagtatcctcaacatcactgctcattgccgcctgaagtgcttttttggaaatttttgcatccgttgtaataaatgcaagcattgtacacatattcggatgaatcattccggaacctttcgccattcctccgatcgttacttctgtatctcctgccataaatgtaaccgcaacttcttttttcttcgtatcagttgtcatgatcgcttttgcagcttctgttccacttgccagatcagctttctttcccttggcaagttctgtaattccggctttgatcttatcgattgggatctgcattccgataactcctgtagaacctacaagaacacctttctcatcgattccaagaacttttcctgcctcttttgctgtctcttcacagtatttcataccttcctctccggtacacgcatttgcaattccggagtttacaataactgcctgtgatttctgtttgctctctacaatctgtctatcccacttcaccggagctgcctttactacattcgttgtaaatgttccggcgactttacacggtttctcactgtaaatgatcgccatatctgtacgtccctggtatttgattcctgctgctgttgctgctgcttcaaatccttttgctgcggtaactccgccttcgataatcttcatatgatctgcttcccttctactgttcattaaatgctgtaatattttcttcatttaaaataaaatcataataattcacatcaagtcgttccgtccatccgattgtattccaaaatgcatttcctacattattttgtgcaaatgcgatcagacaaaccttattgatcttctctgcctggagtgctttcattgtatgcacgaccatgtcttttccgattccatgtcttcggtatgcctcatccacacatacatgatagagacttccctgtcttccatcatgaccacagagaatacttccgacaatttttccttctttcactgcgacaaaactcgttgtcggattccgtcgcagaaaacgttcgacaccttctttcgaatcatcgatactgcgaattccgaatccccggatcttcttccacaatttatatacttcatcataatcctctattgtcattacacgtatcatacataccacctttatcgttactgttcacacgatgtgcgaccagcaaccctttatctcactgttgtcctcactattatgtgatttagcaactttgttgcttctatatttatatatcttatgggaacatcggaacaagttcaagtccttcactctccggaagaccaaacagcagattcatattctgaaccgcctgtcctgcggcaccttttacaaggttatcaatagctcccatcataatgatccgtcctgttctctcgtcgatcttaaatccaatgtctacatagttgcttccttctacccatttggtctccggacactgatctttctctagaacacgaacaaatttctcatctgcataatatttatcataaattgcttttacttcttcatatgtaacttttttcgtaagctttgcatactctgtcgcaagaattccacgattcattggaactaaatgcggtgtaaagttcaatacaactttctctcctgctgcatatccgagctgttcttcaatctccggtgtatggcgatgtgtagctactccatatgctttgatattttcattcacttcacagtaaagattcggaagctttgctcctcttcctgctcctgaagttccagacttcgcatcgatgatcagagtgctcatatcgatcagtccttcctttgcaagcggatatgctgtcaggatagaacatgttgtataacatcccggattggccacgatacgtgcatccttcactttgtcccgattgatctcgcacaatccatagacagcttcatcaatatactgcggtgctttgtgttcgattttataccactcttcgtaaaccttcacatctttcagacggaaatctgcactgagatcaatgatctttgtctttgaaaggatttcttcattgatcagagatgcacacagtccctgcggggttgctgtgaagatcacatctacctgctcggcaagctcatccatgttatcatccatgcattttgcatctacaatctgaaacatgtttctatatacatctgcatatttctgatccacataacttctggatccgtaccagacaatctttgcatctttatgtcccatcaatattcttgcgagctcgccgcctgcataaccggttgctccaataattccgaccttaatcatcgttctcaagtcctttcttttaccatttccatgggagccaatagaagttccctgggaattgcatttttactgtactgtggtaacgtgttaccgcaatcatttctccttataatataccactttaatcgggatgtaaagtatttcctgaaattgaatgtataaaaatacactttccctgctttacttgcataataatacatctttcatgtataatatgcaagcattttttcaaaaaagtttgtagatagtattttcctactatataaagatatataaaaaggcgatgatattggcctaaatatttttttgattttcttcttatttcattcttttcatcatatcttgtatatttcttcttatagcctattgttttatgcattctttttgtttattatgtgtgtctttatgcattttattcatttttttaaaataatacttgcataattataaaatgtggtgtatagtatgttttagcttgttaaagcagaaatctttagaactcaagaaactgagaaaacagaaattgataaaatacattcaggaggcaataaaatgagtaaagaaaaagttgtattagcatattcaggtggtcttgatactacagcaattatcccgtggctgaaagaaacatttaactatgacgttatctgctgttgcatcgattgtggacagggagaagaactggacggactggatgaaagagcaaaactttccggagcttctaaattatatattgaaaatatcattgatgaattctgtgatgacttcatcgttccttgcgtaaaggccggagctgtttacgagaacaaatatcttctcggaacttccatggctcgtccggcaatcgctaagaaactggttgagattgcacgtaaagaaggcgctgttgctatctgccatggtgcaacaggaaaaggaaatgaccagatccgtttcgagcttggtatcaaagctcttgctccggacatcaagatcatcgctccatggcgtatgacagatgtatggacaatgcagtcccgtgaagacgagattgattactgtaaagctcatggaattgatcttccatttgacgcaaagcacagctacagccgtgaccgtaacctgtggcacatcagccatgaaggacttgaacttgagaatccggcaaatgagccaaactacgatgatcttctcgtgctgagcacaacaccagagaaagcaccagacaaagatgaatatgttacaatgacatttgaagcaggtgttccaaagagcgtaaacggaaaagagatgaaagtttctgaaatcatcacagagctgaaccgtctcggaggaaaacatggaatcggaatcgttgatatcgttgagaaccgtgttgttggaatgaaatcacgtggtgtttacgagactcctggtggaacaatccttatggaagcacatgaccagcttgaagagctcgttctcgaccgtgctacatatgaagttaagaaagatcttggaaataaatttgctcagatcgtatacgaaggaaaatggtatacaccacttcgtgaagcaatccaggcatttgttgatgttacacagcagtatgtaacaggagaagttaagttccgtctctataaaggaaatatcatccgtgccggagagacatctccatactcactgtacagcgaatcccttgcaagcttcacaacaggagatctgtatgatcaccatgacgctgacggattcatcaacctgttcggacttcctctgaaagttcgtgctatgaaaatgcaggaagtagaatcacagaagaagtaagaggaatttgttgaacttggattcatacaattaaatcgaatactttcattagaatgatacacaaggacagccctactattaccatgggcaccgacccgctctacctcatccctttgaaagtatgtaacataagagccagaacagttaccgtgtgtggtgcctgttctggctcttactttaattatctctcaccccaaagttcgtcggcttttgttttccactctttggcgtaatgttcgcattttccgcaaaggtgttctacagtttccggggactggaggtctgttgattttgcgccggtttcgtgtaccatctgctgcagtttttctggattttcgagcattgggcacgggcgcagatgattgttgttaaatggctgattgttatggtaagccataaacagtggctggcgtaatgcatcaagcacgctcacttctttaatgtttgcacttgaataatggataaatacgcatggctctgcatctccatttgcattaatatggaagtaatttcttccaccggcaatacatcctcctacaaactctccatcattctggaaatcgaatgcaaagagctgttttccacctgtcaatccacggatctcacggatgcggtgatacatgtattctctctgctcttttgttggaagcagatccagtgctgcatcatttccaaccggcatgtagtggaaataccatgcataacgacatcctttttcaatgatcatatcaaggaatttgtcggatgttactgtatcaatattagcgcgtgtatagcagattgatgttccaaagatcaatccgtatgttttcaaaagatccattgcatgcataaccttctgataaacgccttttccacggcggccgtcgttgacttcctcatatccttccagacttatggacaatgacagattaccaacccgctgcatctcctggcagaactcatcatctacaagtgttccgtttgtaaaagcatggaatacacaatcgttgtgtttctcgcataaacggatgacatctttctttctcacgagaggctctccacctgtcagcatatagagatagattccaagttcttttccttgtgtgatcacacgatccatatcttcaaaagaaaggttcagaagatgtccgtactctgctgcccagcatccggtacatttcagattacatgcactggttggatccatcagaatcagccatggaatattacactgatatttttcacgtgactcatgcattaactttgttccgtaaagcattgcatcaaatccaagattcaatgctgttgtcttaaggacatgcggatctacttcatcaagaagtctattcagatactgaacccatttgttgtccggatcctgaatcatctttcttgcagcttcataagaccctggctggaaacgatcttttgcaaaattttctgtaagatctacaagtttaagaagtgctttcgttctatcatctgtcttgttcatatatttaagtactttatctgctgccaaactaaatgctgctctttctgcctgaaattttaatcctgccatttttttcaccttttccttacttttcaaggaacctttcttaagtataaactattatttcataatctagcattttcctttttttcatgtaagattcagttttttccaaatgtgctgtagtttgaacattttctttttgttgttcttttttggctacaaatcatgtgaaatgtatccgaaatatcaagaaatttcaacactatgttcttgaaaagtcatgttaaagaactgtcaatcttagaaacttttttaatcacattctcttttttatggtataatatttccattgtagaaaggatttgaacaaatgacagaagtgaaaaaagaactgacaaaagatttgctggcactctctttcaaagaacttattatgaagatgccttttgaaaagattacagttaagatgatcaccgacggagctgatgtgatccgtccaactttttataaacattttcaggacaaatacgaaatcatcgaatatatcctcgaaaaagaaatcaaagataagatccaggtactgattgaaaatgacatggaagacgatcttctccgtcttcttttcacctgtctttctaaagacaaagaattttataagagactttatttgatcgaaggtcctaactccttcgatcatctgatgttccaatttatttatgatacattgcttagattattaaacaaatatccattgaaatcacctgcgaagctccagatactcagtcgcgagacaattgcgcgattttatacctttgggctcgcagattctgtaaaatatgcgatcatgcatgatatcacatataccccggaagagattgcagctgcttatgattatctgattcataactccgcatttgatcttatggaacatccaaggatctgatgatacatagaggacttaggaacaatttttagacatattaccgcaatcttccatttacccctaatttcaccataagagcttcttgaagaatctgagagaagttaagattctctcgaacagccgcttcatttaaccattctggaatactgagcgtcttttttacagcctttgatctgtgctttctccgatactctgccatatcaaattctataattaccagaatcccatcttcaggatccaccgtttcaaattctgatgcttttgggatatcagttccttcatcttctatactggacaatgacaaacctaatgcatctatcgccatttcatatgcttcatccatgctatcgccctgtgtcatgcattcaggaaaatcgggaaagctaacccagaaaccgccttcttctgctttatgaaaaacagctggataaaataatctattcttcatcaaataacctctctttcaagcgacaggactatctaagccctgcctgtttaagtattgcctgctccaatccttttttcaagtccttggagtgataaggaacaattactgtcttatcagttttcagattcttcatttttacatgcgaaccattctgactgattacttcaaatccattttctttcaggagttttagcatctccttcgagctcattggcatcttttgtgtctcctttccttatcatatttatatattactacgtaaaaatacgtgcgtcaacgtatttttacgtatcaaaattatattaagaactatgaaatcataaaatccaacaacaaaaaataacgcagacaatatctctatcatctgcgccatttctcattattttgaattatttcattacaatattgataatcttcttcggaacatagatctccttgatcacatttcctgtcagcttatcagcgattgcctctttacctgctgcgattgcatcatctttggagatatctgccgggatctcgattacagcttttgtcttaccgttgatctgaaccggaatcttgatctcatcatctttcatctcgttctcatcatattttggccatcctgcattgaagattgtctcttcatgtccaagctgctcccacatctcttctgcaaagtgcggtgcgaatggagaaagaagtactgcgattgtctcgagtgtctctttgtcgattccgccctctttctttgcaatttccatgaacttgttattgtactccatgaatccggagataactgtattcaggctgaagctttcaagtcttgttgtgatgtcataaaccattctgtgacgaagtttgatcatctcttttgtaggatgaacatccttctccttgctttccataaggatattccaaagacgtttcaggaaacggtttacgccgtcaattccacggtcatcccactctgcatccagctccggtggtcctacaaagagttcatacattctcagggagtcacatccgtaatcacgtacgaggtcatccggtgatacaacatttcctttggacttactcatcttgattccgttcttacctgtgatcataccctgattgaacagtttgtggaatggctcatcaaagtcgattgccccgatatcacacaggaattttgtatagaatctggagtacagaaggtgaagtacagcatgttctacaccaccgatgtacatatctaccggaagcatctcgtctgctttttctctggaaacaagtgcttctgaattgtggttatctacataacgcaggaaataccaggaggatcctgcccactgtggcattgtgttagtctctctcttggaatcacttccacaaaccggacacttgcagtttacccactcatcgattgcagcaagtggtgactcacctgttcctgttggctcgtaggaatctacctctggcagacgaagtggaagttcttcttccggtaccggaacatttccacacttcggacagtgaatgatcgggattggctctccccagtaacgctgacgggagaatacccagtcacgcagcttgtaatttactgttgcgcgtccgattcccatctcttcgatcatatgcggagcttctttcttaagcacagaagactccataccgttccactcaccggagttgatcattgttccgactgcatctgtatatgcctctgtcatattctcgatctcttctccgtcttttgcgataacctgaatgatcggaatattgaattttgttgcgaactcgaagtcacggtcgtcatgtgcaggtacacacatgattgctcctgtaccgtagtcagccagtacataatcagacagccagatcggtgtctttgctccattcagtgggttgatcgcatagcttcctgtgaagactcctgtcttctctttgtcctgcatacggtcaacattggacttcatagatgcatcataaatgtatttctctactgcttctcttgtctcatctgttgcgagagatgctgccagctcatgctcaggagcaagtaccataaatgtagctccgtggagtgtatccggtcttgttgtataaacagtgatcttctcatctcttccttctaccgggaagtcaacttctgcaccgtaagattttccgatccagtcagcctgcatcttcttaaccttctccggccagtcaagtttatcaaggtcattcaacagacggtctgcatattttgtaatacgaagcatccactgacgaaggttcttctttgtaacatctgcaccacaacgctcacatttaccattcacaacctcttcgttcgcaagacctgtcttacaggacgggcaccagttgatcgggaactctttctcgtaagcaagaccttccttgaacatcttaacgaagatccactgtgtccacttgtagaactcaggatctgttgtattcacttccatatcccagtcatacagtgctgcgatatcattgatctgtctcttgatgttcgtgatgttcgcctctgttgattttgccgggtgaacgcccatcttgatcgcatagttctcagccggaagaccgaatgcatcccatcccattggatgaacgatgtagtatccctgctgtaatttataacggctccatacatcagagattacatatcctctccaatgtcctacatgaagaccatttcctgatggatacgggaacatatccaggcagtaatatttcggtttcttgtttccgtcttttccatttcttggattgaccggtgtctcttcccatttctcacgccattttttctcaatggctttgtgattgtaaacaatctttgtacccatgtacttaattcctctctttcatcaatataaagaaaagcctcttcttctcatatatccaagagacgaaaaggctttaattccgtggtaccactcttattcatctgacacaaagtcaaatgcactcattcattctataacgggaactcccgcctccggctaatcaatataacatcttttcaccgaaagaactccgaggtcagttcaaagtctgtgctgctgtctcacacctgccgacagctctctgaaaagcatcttttccttctactactcctcatctgcgtttttacaatatacctattcattataaaaactatgcggatataagtcaaggcttttttccgcttaaagtcctctttttattgccggtttccattctacaaccttgtcttgttccagtgatttcttcacatcgatcaaacgctgattttccgaacctctgaacagcagtgtaatatttttcttatcttcctcgaatcttccatccacaagtacgtccagcatcgaaagcatctcatccgtatactcacatcttgccctgctttctttcttcagttcctcatcgaataaataaccgctgtaacaccagatgttcttctccggataacgttccttcacttttcttagaagcttcacaagcacttcctgattctccggttcgaatggttctcctccaagcaatgacaatccatcaatataattcggcttcaacgcttccagaatctcttcttctgtttcttccgtaaacttctttccataattaaaatcccatgtcatactgttaaaacatcccttacaatgatgcctgcagcctgacacgaaaagggcaacacggacaccctctccatttgcaatatcacattttttaatctctccgtagttcactttgaatcctcttttccacttattccaaaatacatttcgtatcatagcattgattggaattttctttccatttacccctatcataccatatcttttcatcttttgctatcttaagtgatgctgcttagaagtaaccgcccagaagtaacagttcattatcgaaaagcattgaatattgtacataaatatgttatcctatttcaaagcatattttctaaaacatctaaattcatataaaaggtttcattacaggtagaatacacctgtcaaatcagaaaattcatgcttttaaaatccattatttaaagcagaggttttctgatgaagggataacttctgtgaaaaatcacataaggaggtctcttagatgaaacaaaagagaaagcaattgcgtgaagaacagcaaccggcagatggaaagctgcttcagtggcatccagcattttatgcagacttgcagattgaattcagagaagaaaaagaaaaattaaaatttgaacgggagtatctattaagttcaaagccaatggcaattgatgtgttgatcattaaaaatgaaggatgcggaacctatccataaaaatattgggaaaatattccgtaagtataatatcatcgaatataaatcaccatccgattccctttccgtggacgatttctataaggtatatggatatacaaatttttataaagcagatacaggaaaggtaaatgaaattccgattcaggagctgacgatcaccttagtatcaaaacgatatccaagagaactgatccgacatttgaaagaagtacgccactacactattgataatccggaagaagggatttattatgtaattggagatatcttaccgattcagattcttgtaacaaatcgattatcgccggagaaaaatctctggttatatagtttaacagatacactgaaagacatgtctgtcacaaggaagcttttagaggattataaaaagaacaaagaagatcagctatatcaggctgttatggaaattatagtaaaagcaaacgagaatcggctaaaggaggggaaacgagatatgtgtaatgcattattagaattaatgaaagatgaattagatgaaaaaagagaagaagggataagagaaggggaatctcttggagaaaacaggatcaatcagctgattttaaagttgtccgaacttaacagaactgatgagattctcaaagcagctgcagaccgggaatatcagaagaaattattaaaagagtttgggctttaaagagagctgttgcacatagcaacagctctctactatcttggcaagtgcaaaaagacaatataaaaagagcctgacgattaatcgtcaagctccatttttactttacttttgaaaacaattcctgttacaaatacaattgtgattctacagatgcagaactctctccttgatctcctgcgttcttccctgattccagaactgcgttccgatatatccgcaggtacgtcttgcaacattcagtgtatcctggttgcggtttccgcaatgcggacactcccatacgagctttccttcctcatctgttatgatctgaatctctccgtcatatccacattcctgacagtaatcactctttgtattgagttccgcatacataatgttgtcataaatgaaacggatgacctgaagtacggctgcaatgttgtctttcatgtccggaacttctacatagctgattgctccaccggaagaaagtgcctggaactgagattcaaacttcagtttcgagaatgcatcaatctcttctctgacaaatacatgatagctgtttgtaatataactcttatctgtaattccaggaacaatgccaaatctcttctgcagacattttgcaaacttataggttgtactttcaatcggtgaaccatagatactgaaagcaacgttcgtctcctctttccactggttacatgcatcgttcatgtgcttcataacatccagtgcaaatggtgtagcatccggatctgtatgggattttcctgtcatatatttcacacactcgtaaagtcctgcatatccaagagaaatcgttgaatatcctccatagagaagtttatcaatcggttctcccttcttcaggcgggcaagtgctccgaactgccacagaatcggtgctgcgtcagacagtgttcctttcagacggttgtgtctgcacatcaatgcgcgatagcaaagttccagtctgtcatcaaagattttccagaacttatccatatctccaccggaagaaagtgcaacatcaacaaggttaatcgtaacaactccctgattgaaacgtccgtagaacttgtagtttccgttctcgtctttccatgggcttaagcagcttctgcatcccataaccgggaaacaatttccttctttaagctctttcatctttttctcggaaatgtaatccggaacaagacgctttgcagtacactttgctgcaagttctgtcagataataatattcgcttccttcttcgatattatcttcttccagaacatagatcagtttcgggaatgccggtgtcacccatactccggcttcattcttaactccctgataacgctgacgaagtgtctcttcgataatcatcgccaggtctttcttctctctctcgttctttgcctcgttcagatacatgaaaactgtaaggaacggtgcctgtccgttagttgtcatcagtgtgatcacctgatattcgattgtctggacaccctttgtgatctctttcttcagtcttctctctacgatctcattgagcacatcttccggatattccattccgaccagttcctgttcgctgatcacttccttgcggatcttctctctggaaacatctacaaacggtgccagatgagcaagtgagatactctgtccgccatactggttacttgcaacctgggcaatgatctgagttgcgatattacatgctgtagagaagctgtgtggcttttcaatcattgtaccgctgatcacggttccgttctgaagcatatcctccagattcacaagatcacagttgtgcatatgctgtgcataatagtcagaatcatggaagtggatgattccttctctgtctgcctccacaatatcatgtgggagaagcattcttgttgtcaggtcacggctgacctctcctgccatataatctctctgtacgctgttgactgccgggttcttgttcgagttctcctgctttacatcctcgttgttgtactcgatcagtgacaggatacgattgtctgttgtattcgccttacgtacaagggatctcttataacgatatcttacatacttacgtgcaagttcaaaagctccggtagccataatctgattctctaccatatcctggatctcttctacggatactgcacgattcaacttgttacacttgaattccacatattctgcgatatcttcaatctggctgtctgtcagcgtacgctccccattatccttatccgctttcgtcacagcaaccacgattttctgtatatcaaatgtctcttccgacccatttcgcttgataattttcattgatcagtctcctcactttttcttattcttgcacgatatcttgtgttttatccgtttctatcgtgctgtctgatacttattctaatacaaaatatagtataatgcaatccccaaaacacagtatcatgtattttcagaacatctgctacattttttgagtttttcatttaactgataatctttactccatctgttatacaaaatcaaaactgtctatgaattatctgtctactcattctcctttcacacctgcggaaaaggcagccaaacagtccttattcaaggactttggctgccttttctttcgttttatttcaggtaataattctatttatttttcgaattcacagataattcggtcaattctttttctaataagatccgttatgttttgcatggaaatctcttgtctctttgacgatcactccgttcaatgcaagaagtgcgatcaggttcggaaatgccatcagtgcattgaagatatctgcgatattccatactgcttttactgtcatataaggtccaatgaatactgcaaggatatacaggatacgatatcccattacaactcctttatttctgttaaacaggtattccacgcatctctcgccgtaatagttccatccgagaattgttgtgaatgcaaagaatacaagacacagcatcagggagaatgtcgctacgaacgatgggaatggaagtcctttctggaaagcatccattgtgattgccacaccttcaagttccgggttcagccaggaaccggcgatcacgatagaaagtcctgtcattgtacagattacaattgtatcaataaatgttcctgtcatagacacaagaccctgacggaccggctcttttgttcttgctgctgctgctgcgatcggtgcactaccaagtccggactcgtttgagaagattcctcttgcaacacctttctgcattgctacgaacacggatccaaccgctcctcctgcaagtgcacttcctgtaaatgcagatttcacgatagaagccagcgctgcaggaacagctgtgatatttgcaataatgatgattactgcaagtcctacataaagaactgccataaatggtacgataacttctgatactttagcaattctctggattcctccaagaacaacaagacctacacacactgtcagaattactcctgcgactacagttgcccaagaataatttcctccaaacagggaaactgtatgtgccatatccgggtcgaagaaattcttaaccgctgatgcaatactgtttacctgtgtaaatgtaccgattccgaagagaccaactccggctccgaagaatgcaaaaatcttcgcaagccatgtccacttcttacccattccgttttcaatataatagaatggtccgccaagtacatgcccgtcttcgtcgattgtacgatatttgattgccagaagaccttctgcgtattttgtcgccattccaaagaatgccgcgataaccatccagaacaatgctcccggaccaccaagtgcgattgctgttgcaacacctgtgatattaccggttccgattgttgctgacagagccgtacaaagtgccccaaagctggtcacttctccgctaccgtcttcttcatctttaaacatgaatttgaaagctttgccaagatgcctgatctgtacaagaccaagtctggctgttagaaagatacctgttgccatgatgaggcagatcaacggaagcccccacacagcattgtcgattgcagtgatgattttgtcgatttgtgcaaacatttctttattcctccatccttttgcctgagagactcgcggcatgtaactgcatccatgaccgcttacaccttcggcgctctttttaaagagactctcctgagtattgctgtcattcacgtcagatgtaaatgacagcaagttttctctttcgtgctttaacacgatgaaattaagaatagcactatgttataagaaatgcaatacgtttcaaacattttttcaattaagattactaatatttattaataaacattaacaataagattattctgccagctcttttcctgctgccttaagttcttcaagtacgtcatcctccggagcctcatttgcgatgattccttcttcacggatcaactgtgccccagcgtttttcatgcggtctgcccagtctctcatccattctccgtctccccatccataagaaccgaacagaaggatcttcttccctgacacataagattccagttcttctacaaatggttccatctcagattcttcaagtacctctgcccccattgccgggcatccaagtgcaaatgcagcttcttctgccactgtttttgcatctgcatttcctacttccagaagttctgcttcctgacctgccgctttgattccttcggcaaccgcctctgccattgcctgtgtattaccggttccactccaatatacaactgatatactcattttataaattcctccactttctttgattcaatgcaatttcacggatgttttttccatccagatactcattcaccgcacaaacctttgcacggtcatattcatgaaaaatcattctcgctttttcaggattactatatactttccagtatcctgtcataataaaatctctgccttctttttcaataaagctctgcacatctgccgtcggatatccgagaaaagctccaatctcatgtgggaatccaattccttgtgcagtacactcgcagatacgttctgacagatgtgccagcatttcctcgatattgctttccttatatccgtattgtccgatcagttcgcggagttttggctggttcatatattcttccagctctttggggcgatagaaaaggacaaggcatttcccctctgagcaggataatttataaaaattgatctccatcccggaaaacatttcttccaattcagaatatgattcattttccattgaaatcaggccagatactttaagcccttttagaaaaggcgcacactgtaatataacctgaaacccaagcctcaccttccggtctttattttttagatagtaggataatacttccgtcggcatatcgttctccttagctttattttgagaatagttttcattcaagtattatgttaacataaatgaaaatgattttcaatacagtttttgagaacttttctcattaccgtggtggcatcttactgctcatttcttatggtaattccgcataaaactttttcaaattttaacacttttttagttgttactcacatatctttagtgtataatgaatttataaatatttgagaggtgagaaaatctcaaacattatacacacttacataaaggagagattcgccatggtaaatttaatcacaggcccaagaggcagcggaaaaacacagcagatgatcgatcttgcaaacgagaaggttaagacttcttccggtaatgtcgtatttattaaaaggagcagcaaagacacttattctgtagattttaatatccgtgtcatcaagatggctgattatcctgacatccttaccttagaagaattcgtaggtttcctctatggtatggctgctggcaatcacgatatcgaggctgttttcattgacagtatcttaaagcaggctaatatcacattagaaagtcttccgacattcatcgagaaattaaataagatttccgaagatgccaagattgacttctacctcagcgtcagcgcagataaagctgagattgcagatgttgacacacttggatgcacagttctgtaagtatttacaacgtagtgtaacacaggattcgcccttttgggtctgaattaaatgttttcaggaatcaaaaaagaagtacttccgttttccggttgtacttctttttttcgcttctttctcttattctgtctgtgcagaatcccctgccgtatcttctgcctgctcttctttcgcagcttttgtgctgatctgttcactcgcttttccattcagggaaagaactgtatccacctgctcccccttcttatactcaactgtgacttcatctccgacattaaaccggataatatcaataaaatctacaacagatacatcaaagatctcatccgaaccttcaagcatgatataataatgagaatcaccgtctataacgccctgggcgatctttgtgatcttagctgtcagtgtctctacggatcttgtatcctcagcttctgtcttgatcccgttcttatacatcagattagtgtaagactcctcgcattcactgaccgtatctccaattgcaacaatctgatatttctgcacatttaccatcgcatacttcttcaccagaccggcatcatccttcaatgcaatgaaataggtcggttcaccggaaatatttaaaagcagtgggaatgttgccgtatagtgcagattctgtacctgcccttctgcggaagacatcgctgaactctctgttgctccttcaatctcatagaactttgtctccattgttctctgattcatcagaacaaaccctacattcgattggtctccggtaatcgaggtaacacctgtgtatacccatacatcgtcatcgattgcaagataattgtatccgtcagttgtattcaagcagtctttctgccccaatacactattaaagaaaccatgtttcaatgttccgtgataattataaagctcaactaacagatctgcggaatatactctgtcaacccactgtgggacatcctcaactgcataatccttcgtttctcctgtgatcgcattgcaaagtacaactcttccgattgttgttccaccgaataatccgatattgtacttcttcaccgggcagatccagtacggaaccccgtcttcatcaatttcaaaactcaaatcattaaaaatataggtcggatagttaaatctcagatgacggtaaatatttctgttaaaatgatcacttgtcgtgtacttcatcccttcactcagttttacgagttccgtattctgtgttgccatatcaatcttgatataggccgggattccttctctcatgttcgtaaaccatttgatcacgctggcatatttcaaaggagaaactctcactggctgatcctgatagttgatctgggaatacagttcatctacctcgaactgggataccatatctaccatacttcccatcttcctgtcaccgagaagctctgctgaatccttatccagcaatggaatctgatcaaaagataattcttcgatatctttcgtaaattctccattcttcaccatcaaaagttcctgatacttcttcgcattcacaattggagaagacaaaactgatcctgccacatatgcgatcacaagcaccgcaaggattccaaggatcacctttaatccctttgactctttccagtcgtaacggtttaaatttttctttctgataaataccacagctgccagaatgaccaacaccacaagatacatccagaattctgaggcatgaatattgatcgccgggagtgtcacatagtaatagattccaatcaacagaatcactcctatgacagctgtcactttcattttaaatttgttcatctcacctcttcctttctttcattttacgtaattgttcagagccaacctccaaaatgctacgcattttacacctgttttttgaaattttgcttagctctgaacagttaccattttatcatataaaaataaaatgtgcgaaaaaatctgtttcattcaaatttttccgcacataattaacaaaaaatcatctagaatcttcttctccagagttccggagaaagaagaagcaggtatgggaagatctctaatcttccaatcagcatatcaaagcagaataccagcttggatactgctgaaaatgggtggaaattcatcacaggtcctacctttgaaattccaggtcctacattgctcatcgtagtaagtactccactaaatgttgtcgcaaaatcaaaattatcaatagagacaagtaaaattgatacaatcataattataatgtaacacgtcagatagagatttacattcttcattgtatcctgtccaatctttttaccattgactttaatgatcgtaactgcatttggatgtaacatcttacgcacttctctgcggattgatttcacgatgatcaataaacggcttactttaatacctcctccggtggatcctgcacaggctcccacaaacataagtgccaataatattgatttcgagagttccggccactggtcataatctgcggttgcaaatccggttgtcgtaatgatcgaaccgacctggaaagatgcatagcggaatgcatgtgcaaccgttccataaatcttgaggatatttcctgtgattatagcaattgacacacctactattccaagatatgcccacagctcttcatttttcagaatggatttccagtctttgagcaatatgaaaaagtacaagttaaagttaattccaaacaaaatcataaatactgtgatcacaccatcaatatatgcactgtcgtagaagctgacgcttgcagctctattagaaaatcctcccgttccggcagtactgaatgcatgtaaaagtgcatcatacaagttcattccgccaaaaagcagaaaaaccacttctgctgctgtcagaacaaaatacattccatataaaagtcttgcggtatgtcttgcctttgggacaagcttatccgcctccggtcccggtacttccgcacgcatgagcggcattgcattctcatcatccagagatgtgatcatcataacaaatacaagtacccccataccaccgatccagtgtgtaaagcttcgccagaaggaaattcccattggcagagcctcgatatctgccaggattgtagatccggttgtagtgaaaccggaaatcgtctcaaaaagtgcatcaatataatatggaatacttcccgaaatcacaaacggaagcgctccgaatgcggaccataaaatccatgcaagcccaacaataacaaaaccttcttttccgtaaatctgctttgaagccggaagcttccttccgaacaccatataaattacgagcaggattgctgctacaatcagaaaagaaattacgcttttttcatgatatatcagggaaaccaacgctgggatcagaagaagtaatccctcgactcccatcattttccccaaaatatatactatcatcttcttattcatcgcgctgcacctacattaaaatatctttaatatcttcaatctgtttttccatcgtgataatgatcacattatctcctacctgaatacaatcatctccgctcggaagaatgatctgacgttttcttgcaatacatgcaatcagattattcggtttcaacgagagattcttcaatggaattcctgtataatttgtcttagccttaacaataaattccagtgcttcaactttgtcatcaaccaattgatacattgtctcaacattcgcacttccctgagagtttttacgcgctctgacataactcatgattgcgtctgctgtagctgttttaacagaaacaatactgtcaattccaaagtcttctaccatacgtgcgcgtctgtcttcattgactttcgtaacaattttgtccacattctgactctttgcaaaaagagaaagtataatgttctcttcatccatccctgtcagggcaacaaatgcatccgcttcatcaatcccttcttctacaagaagatcgtgatctgttgcatctccattaataatggttgcttttggaagtaattcgcaaagttcttcacatctctggcgattctgttctataatctttatctgcataccaagtgtgctaagctgaagtgcaagatagtaaccaactcttccggctccacaaataatgacttttttgattttgtccttacgctttccatttgctttaaaaaatgcctctaaatctttatgagatgccgcaatatgcagacggtctcctgcacgcatcctgtattctccatctggaatgcaaacttcatctccatgttccactgcacagacaagcagacggatctggaaccggttatacatttccgcaaggcttaaccctgccaggctacttccctccgcaagcggtaattcaatcaattctacacgtcccttcacaaaagtctccacctgactcgcatccgggaagagcagaagtctgctaatctcatctgccacgataagttccgggtttacagccatgctaagatgcagatcttctttcagaagtccaatctgacgataataaatcggattacgcacacgggcaatcgtatgtcttgcacctaattttctggcgatcagacagcttaacatattgcattcatctgctgatgtacaagcaatcaccaaatcggcatgcgctacatctgcctgtttaagtacttctgcgtctgcgccatctcccgtcacgcaggcaatatccagacgatccatagcaaatctcaacttattttcattactgtcaatcattataatgtcatatttctcggcggaaagttgcttggcaagcttgtaaccaacctttccgtcaccgataataataatcctcattttcttatccctcatattattataataatcttataactgctctacacagtcactttatgtcactgttcacaggatttcataaacaacaacatacctgtctaatgcagacaggtagatgaattatagcacctttgttttgaaagtacaaccatattctcaaacttgtgatttttttgtgaaatacaatgttactgttttttctaaaacaagcaataagagcgtgctatccactcctttttatcagccggataacacactctttgtattgcctgaatctttaattatgcttcttctgctcttgcagcaatttctttctcctgtacatcagatggagcctgctcatatcttgcaaatgtatattcgtaagatcctcttccacctgtcatggagcgaagtgttgtgcaatagccaaacagtcctgtcattggaatatctgcttcaatagcctgctttcctccggctaccggtgtcatgccaagcacacgtcctctgcgtttgttcaggtctcccatgatatctcctgtgtaatcatccggaactgtaactttcagggatgcgattggttcaagaagtaccggagatgcctccatgaatcctttcttgaatgcctggatcgtagctgtcttaaatgccatctctgaagagtctaccggatgataggatccgtcgtataaagtagctttcacaccaactaccggatatccggcaagaggtcctttcactacagattcctgcagacctttctctaccgccgggaaatagttcttcggaactgctcctccaacaacacattcttcgaatacaaatggagtttcgagatctcctgatggttcgaatttcatcttaacatgtccgtactgtccatgtccgccactctgtttcttatacttggaatcaacgtcagaattcttacggattgtctcacggaatgcaacttttggtgtctccagtgtgatctctactttatatcttgccgccagtttacttgctacgatctcaaggtgttgctcacccattccataaagaagagactgtctgttctcactgtcattcacagctttcaatgtaacatcttctgctgtcattcttgcaagagcctgtgataccttatcttcatcgcctttattctttacgcgatacttcatatatgtatatggtacagaataatctgtctttgcataagataccggtgttccctttacagaaagagtatctcctgttcttgtatttgtcagtttaccgattgctccgatatcacctgcgaaaagctctgtcacttcgcttggcttacttccgcacatggtataaagtttacctggtttctcttctgcgtctgtgtctgcattataaagtacatcatctcctttaagtactccggagcatacctttacgaaagagtattttccaataaatggatctaccattgtcttaaatacatacgctgattttgcttttgcgaaatcataatttgcttcaaaaatctcgtttgttctgcggttgattcctgcacaggttctcttatccggactcgggaagaaacgaacaatatctgaaagcaggttggctactccctgtgcctggatattggatcccatcgcaaccggtacgatatccccatccattacttctgttctcatggctgcacggatctcttctatagagaattcctcaccattaaaatagcgctccataaactcttcacttgtctctgctacagcctccataagagaatctctcaaaatctcaaggttcggcatacagtaatccgggatctcgcactcttctctctgtccaatgcctgtatatcttcttccggcattcttaataatattaatatatcctacaagcttctcgttctcacggatcggctggaaatgtggtgcgattttctttccatatctctctgtcagatctgctactacctgacggaaacttgcatcatccacatccatctctgtcacatagatcattctcggcagattatatttgtcacaaagctcccatgctttttccgttccaacctgtactcctgccttaccagatactacgataaccgctgcatctgctgcactgactgcctcttctacttctccgacaaaatcaaaatatcccggtgtgtcaagaatattgatcttcgctttctcccactcgatcggtaccagacttgtgctgattgaaaatccacgtttctgctcctctttatcaaaatcgctcaccgtattggattcggaaatctttcccatacgattcgttgcacctgatacgtagagcatcgcctctgcaagacttgtctttccgcttccaccatgaccaagtaataccacatttctgatttcgtctgttctgtaaaccttcatactgctgcctccttgttatgtagctattatgcacatcgtttttttgtcgtcgatatacataccatgggtatattgtactaaatattctgattaattacaactattttttacattttatacaattttaactttctatcataaagctactctttgaaaacactccgcttatattagaagcaatattgtgttgctgttcacacaatgtgcgaccagtaacgcaatattaccaatttacttttacagagcaaagtgttaaaatacgaatatatgtttcttactgatttaagatttctgaacagtaagatatgttttgcacaacaacagaaaggattttacaactatgaatgctaaaaaaattggatttatcggacttggacttatcggcggctctattgcgaaggcaatccgccagtattatccggattacgacatcatcgcattcgataaaaataaagaatcccttgcactggcaatccaggaaggcactattcatacttcctgttcatccattgatgacaatttcaggggatgtaactacattttcctctgtgcaccggtcacttacaatgctgcctatctttcccagctgaaagatctcctggatgaaaactgtattctcacagatgtcggaagcgttaagacttccatccacgaagaggtgattcgtctgggaatggaagcgaatttcattggcggacatccgatggccggttctgagaagagcggatttatgaattccaaagctcatttgattgaaaatgcatactatatcctgactccttctgctaaagtagcggaagaaaaagtggatgcttacaaagactttgtttcatctttaaaagctcttcctgttatcctggattaccacgagcacgatcatattaccggaacgatcagccacctgccgcatattattgcatccacacttgtgaattttgtacatgatacggattcgaaggaagggatgatgaaagcgttggccgcagggggatttaaagatattacgagaattgcttcttcctccccggtcatgtggcagcagatctgtctgaaaaacagtgagaacatctcccagatcttaggtgaatatattgaagctctttcacatgcaaaggatcttgtggatgaaggaaatgaacctgccctgtacgctctgtttgagaattccaaagattacagaaactccatgccgaacggatctgcaggaccgatcaaaaagcagtttgcactttattgtgatatcatcgatgaaacaggtggaattgctacgattgccacaattcttgcaagtaataatatcagtatcaaaaacatcggaatcatccacaaccgtgaatttgaggaaggagttcttcgtattgaattttatgatgaagattctgcaaacagagcttctgtacttttgcagaaataccgctatgtcatctatgaagtctgatagcagaaatgaggaataagattatggaattatgtaatattacaggattaaaaggaaaagttacaataccgggagacaaatccatctcccaccgctgcattatgttcggctcgattgcaaacggaacgacgcagatccacaactttctctctggtgccgactgtctcgcgactatccgttgtttcagagagcttggtattgagattgaagttgagagcgattattcttccgttatcgtacacggaaagggattgcatggactgagtgctccggagaagatccttgatgtgggaaacagcggaacaacaacgagactgatttccggtattctcgccggacagccgtttgactctaaattgtccggagatgaatcactgaactcccgcccaatgaaaagaatcattgaaccattgacacagatgggcgcacatatttccagtattctccgcaatggatgtgccccgctttatattaccccggcgcagcttcatggaatccattatgattcaccggttgccagtgcgcaggtgaaatcctgcctgctgctcgccggtctttacgcagatggtgagaccgctgtcacagaaccgagtctttccagaaaccatacagaattaatgctgaaagaattcggtgcagatatccgctctacttttgagattggttcttccaaagcaaccgctatcatccgtccttgtgaagaactttacggacaggaaatcacagttccgggagacatctcttccgctgcttatttcattgctgccggactgatcgtccctgattctgaaattcttgtagaaaatgtaggaatcaacccgacacgtgcaggaatcttgagagtatgtgaagatatgggtggtgatatcaccctccttaacgaacgtacagaaggtggggaaagaattgcagatgttcttgtccgcacaagtagactgcatggaactacaatcgaaggagacatcatcccaactttgatcgatgagattccggttattgcagttatggcagccatggcagaaggtactactataatcaaagatgctgccgaactgaaagtcaaagaaactgatcgtattgagactgtaacagataatctgaaagcaatgggctgtgatgtaacacctactgaagacggaatgatcatcaatggcggaagacctcttcatggtgcttctattcatactttgttagaccacagaattgcaatggcattcagtattgctgcacttgttgcagaaggtactacaaagattcttgacagtaaatgcgtagatgtgtcttacccaacattttatgacacctttgagcagctgctctaaaagagttgctcagacatttttcaaccacaaagagctgaacagaagttttcaatatacttctgtccagctcttgattttttctatttttattttgatatctttctgacgtcattcaatcccatttacaggaatgcatatttcaaaacaaacagaattgctaaaatatacatcagaagacttagtttcttctcttttgcttttcctgttaacagattcagaaccacatatgtgatgattcccattgagattccttctgaaatactatagaagaatggcattgcaatgatacatacataacaaggaattgcttctgacagatcatcgaaatcaatgtttgtaatattcgtcatcatgtaaagtcctacaatgatcaatgccggtgctgtggcaaatgatgggattgcaaggaaaatcggtgacaggaacaatgcaagaccaaacaggattgctgttgtcactgctgtaagacctgttcttcctccctcagatactcctgaagcactctctacgaatgttgtagttgttgatgttccaagaacagctcccgctgttgttgcaagtgcatctgcaagaagcgctcctttgatctttggaagttttccctctttgtcaagcattcctgcctttgaagaaactcctacaagtgttccgatcgtatcaaacagatcgacaaataagaacgcacaaagaattacaacaaagtccaaagtaaagattcccttaaactgaagtttacagaaaatcggtgcaatacttggaatagataatccgtgactgaaatccggaagcaggctgaagcatccaacttctgcattcggaacataaattccggcaaactggcatacaataccgattgcccatgtgattaggattccccaaaggatatttccctttacattcttaactacaagccatcctgtaatcagaataccaataatagcaagtagaactgtgattccaacatcgttcattgttgcatttacaccattgagtttattataaccatccactgagaacagttcaaccaatgttgcgccgcccataacgatatgcgcattctggagacctacaaatgcgataaataatccaattcctacactaactgcggatttcagattcttcggaatcgcattaaagattgcctcacgtacatttgttacagacagaaggataaagataataccttctgcaaatactgcagtcaatgcatattcccagctatatcccataccgattacaactgtgtacgcaaaatatgcattcaaccccattccaggtgctaatgcaaacggatagtttgcaagtactgccatcagcaatgttccgacgaatgcagccaatgctgttgcagtaaatactgcacctgaatccattcctgccgctgacaggatacttggattcactgccaggatatacgccattgtcataaatgttgtaattccggcaagaacctctgtttttacatctgttttgttttcagaaagcttaaatattttttctaacattttgccctctcctttccctctggttccttttcataaccgatgttattgtaacatatttcttcacactttacattcaaaaggcttatcaccttttatcataactggtaataagcctttttaataattcaattaattctctttttcattcaattcaacaagcatctcacaaacgcgcttcccacttatcggatggcgcttatacggagcgatctctcccaacggttccagcacgaattttctcttgtgcatctctacatgcggaatacacagatccgcctcttcaagaacaagatcgtcgtaaaaaataatatccagatctaatgttctcggaccccagtgaatgattcgctctcttcctgcttctttctcaattctgttcaattcagctaaaagctcatatggataaagcagcgtgcgaagtttcagacagccgttcaggaaatccggctgatctgtcactccgtagggaggtgtcacaagatattcagatacgacctcaactttacttgtcggaagttcattcaatgcctttactgcattatccagatacatcttactgtccccaatgttagatcctaacgcaatgtatgctgtgtgccagccacgctctatcttcacgctgactgtttttaacggaagtcttacaggcgcccatggtttcttgatctctatagatattttttctattctgtcccactcaagaagcaacgcttcagccagttcttccgctgcacgttctaataactgataggtatttttctgtaaaaactcagtaataaatgcactaacttctccgtagtggatggacgctgtcagatcatctgtttttcccgccatcctggtatctgtaaaaagcactgctgagacaacaaacttctgtcctaacgtattttcctccggaaacacaccatgatttgcaaacacttccagatcttcaattctgatttcatcgcacttcttctgcatctgtcctctatacctcatgttctctcattaatgctcttgtcatacggattactctcttattcttctccacatcatgaacacggacaaatgcacaacccttctgcactccgtaaactgttgtaaccatcgttccctcttcacgttcttctaccggaagatccagtgtcagaccgatcactgattttcttgaagttccaagaagtaccggatatccaagttctttcatgatttcaagtttatcaataatttcgagattcatctcgtatgtcttgccaaatccaacgcctggatcaagaatgatcctatcatctgcaatccccgcgtccttcgcaatcttcacacattctttcatgtcatccataaagtctgcaaggaaattctgataatctgtattctcacgattatgcatcagacaacacgctactcctgtttttgctatcaatcctgccatcttagaatcgtattttaatccccagatatcattcacaagatccgcacctgcttcaattgccgctgctgcaactgcacttttataagtatcaatcgataccggaatatcaaattcttctttgagttttcggattaccggaacaacacgcgcaatttcttcctcttctgtaatctgtacatgtcccggacgagttgattctccaccgacatcaatgatgtccacaccttcctgaatcatctgcttcgcatattcgattgcacgatccaatccgtcgtatcttcctccgtcagaaaaggaatccggtgttacattcagaattcccatgatataggtatttttcttcaggtcaaattcttttccgccaattctcatatctctatctccatattcttctcttcttccgtccagttacactgtttctgtgccgggcaggaatgacacatacgcgagcgtttgtcactgtcataaaacaattcttcaatcggttccattccctcatgttttctgcgatgaccacggatagcccgaagaatctgctgctgttcctcttctgtaaactgtgcatcttcaggtaatgttgttaaaatctcttttgcaatcttttcacctgctacttcatgtggaattgtccatttatattgaaatgattttccaatgtcatgaagtactgctgccgtatagatcacatctttctcaaacccaaggttctcttccagatttttaatatatgcgatccttgctacatccagaaaatgtggcatctgatgacagcaaaagatacgctccttctctaaccgcttgattcttccataataatcctgatagatccagtgatggaccacttcatttaaccgatacatattttcctgtttcaagtctgttcacttcttttcctttacgtattctttatcttccaagcatacggaagaatctttcttctaatgtcgggtctgtctcaaacacacctctccgtgccaatgtaactgtctggcttcccggtttcttgattccgcgcattgtcatacacatatgctctgcttccaccataacgagagctccctttggctgcatatactccatcaatgcgtctgcaatctgtcctgtcagctgctcctggagctgaagtcttcttgcaaatacttctaccgtgcgcgccagcttactcagtcctaccaccttaccatccggaatataggcaatatgggcttttccataaaaaggcagtaaatgatgctcacaggttgaatagaatgtaatatctttctctatcaccatctcactgctttctaccgtaaatgtcttcataagatgaactcccgcatcttcttccattccaccatatatctcttcatacattctggcgatcctgtcaggtgtatctataagaccttcgcggttcacatcttcaccgattccttccaacaaaagacggactgcctgttctactttttcatgatctatcattttatatttctctcctatatctcactgccggttattcaacacgatccgctgaacctctccaagataagacagggatccgcatgcaagaatcacagttttctgcgcaatatccttgccttgggtcattgcctctttacttgcatcctcaacagctgtttcgatggtctgttcagctttcactttctgacaatgtttcttcactacttctgccagcttttctgccggaagcgtcctctccttatttggaagactaacagtatatatactttctgccaacgggcaaagaatagatgtgattttctcatattctttatctttaaagactcccatgataaagattttcttataatccgaaaaataacgttctaccgtcactttcagctttaatgctgcgtcttcattatgcgctccgtctacgaaaaataacggggactctgacaggcaggtaaaccgtcctgtccatctcgtctttgaaagcccctctcgcacctgcgcttctgtaattcgataccccagtctgttcagacagcggataacttcgagcgttgttgcaagattctctctctggcactcgcctgcaagcggactatgcatcttttcatattctttataagaaaatgtaattccgtggtaggaatcttcaaaaatcatcatctgttccggctgtgcttctgtgaaaggacagcctttttcttctgcagtttttttcagaatctcccggacattctctttctgcttcgcagatactactgcacatccaggcttaatgattccagccttgttctgcgcaatctcttccaacgaatctccgatcacaccaagatgatccacactgatcgttgcaaatgctgcacacaccggtgctccgatgatgttcgtcgcatccagaattcctccaagaccggactccagtacgaccagatcacattttttcttcttaaaatacagaaaagctattgccgtttctgcttcaaagactgtcggagattcctctccggccgcctccatccgggcaatagcttcttttacattctctgtcaattctgcaaattcatcttccggaatccatgttccgtcaatctgaatccgctccagataagagattactgtcggtgagacatagcgcccggttctgtatcctgcctcacttaatattgttgaagtgtatgcaagcacagatcccttgccattcgttcctgcaatgtgtataaactttaagtcatcctgtggattcccaagctcacgcaacagacctcgaatcgtatctaagccaagtacacttccgtatttcgacatctcgtccaaatatacccttgcttctttataggtcacgttttgttccctctctattcttttttctaatcaaacagtcttataataccactattctatctttctaacaagttctaacaaagtttttttgcatctgttttacatctgatataataaagcattgcaaatacatgcggcaatattgcttccgccttttcttccccgtgccacgatcgacggtgtatcttccagacttaagatcagttcctttgactgcacgacatttacaaaccctaccggaactgcaatgattaattccggattaatctttccttctttgatcaactcataaagccgtactaaagctgtcggtgcatttccaactgcaaagatagcctctcttcccaatgcagctgccttatccatacttgctaccgctcttgttgtgccattctttttcgccatctctgccacatcttcatccgacataaaacaaagcacttcactgccatgctctgccagacgtttcttattaattcctgcttttcccatctgtgtatctgtgataatcggcacacctctgcggatagcatcctttgctttctccacaacaccttctgtaaaaacaagactgtccgcatactcaaaatcagcgcttgtatgaatacagcgtttcacgatcagttctgtctccggacagagaatctttcccatctcttttaattcttctgttataatctcaaaacttctcttctctatttcagaaggaagtacctgttctatctctgaaagcatccctaatttcctttcactttattctctgcggaatcccacacacaattcgttccacacaatccgcctgttctgcaagttccgtcatgacacgcccgtgaaattccctgtattctctttcaaaatcatcgataggtacaagaccgtatcctatctcgtcactaattaataattgaaggcttctattgttctcaagtatcgtcagtaatgcttcctttgtttttccttctaaaagccagcgtcttgtaaaagaattgaatttattgattgccacacaatttctgatttcatccagcgaacaattgaatccgtctgtcagctcaagtcccggataaattttcgttgcatattgtgtttttccctgaaatgcaccacctataattatatgaactctattttctttctgacacatcaccgactctcctgatttgttactgtccacgccaggtttttctgttctattgactagcgtatccggtttctttttctgctgtgcaattccataaataacttctgtcacctgatctgccatcgctgcaatttcacagttgatccttcctagaatccttttgtattctttcatctccggcgaatccggaaccgattcggaaaacacttcatttgtcacaatcaccagattcgaacactgttgattcaattctcggatcccttccagaatggcttgatctgcatgacatcctgcaccgaattccatatacatttcatttgccacgagattcgacatacattcgagaagcacatctgagccttgtaatgatccctcttccaaatgtagcttaagtcctgtataccactctaatgtctcaaacccttttcctttacgaagaatacggtgtctttcaatcttcttttctgtctcttctccataaggatacatggttgcaatataaaagagaggcttcggatcctgcctgttccattcacagatccggctttccgcataagctgattttccgcttccgctgcctcctgttactaactcaagcattctccttcacctctccctgaatttatcaattcaacctgatcataaacaaagtatagcatataacaaacttactgtgggattaaatttcttatagttctatcacatccagatcatccggcacaaacagatttccgtcataataagctttgccttcttccagatacaactcctgtctgtgttcaatattcttatcttctgtatgatacagaatcagattctccacattcaggtctgctgccatctcacatgcatcttttactgtggagtgatgcttctcatatggcttgaattcatccgcctgtccgtagagacagaatgcctcatgcaagagccatgtactgttctcagcatacttctgctctaattcattgtacggctcatctccacagcaagtcagtttctcatcctcatctaaccgcatacaaaatccaaactgttttgcctttgtagaatgaatatcgaaaaatgttattttctttccaatgatctcacgttcttctccatcttctactacgaccatgtgaagacgatcatctatatatttcatctccttcgccgaaagaacttcacctgccatctctttcagaatacggattacttcttcatgtccgtaaattgtagcttctccttcgtattttcctctattcatattctgaagaatcatacgcatcatccagataattccaagaagatggtcgatatgcttgtgtgtcacaaaaatatctctcatatccatccagttaagtcctgctgcttttaactgatgaagaatcgtatttccgccaccaccgtctaccataaaatgacggtcgtcatcactgatcacaaagcatgtgttatagcactccgtaacggttgcatttcctgttccaagtattgtaagcttcacttttttctcctttttgtctgacctgacagttattttccaaatccaaattcttcataatcttccggcaggaatctatggtaaatgatatggcatccttcatctttaaagcaataccggtaagtatcctccggatcattttcaaagcagatcatataatcaaattcatcactgtgcatctcttcgatcgtaatctgatccgaatgctgacggaacagttcaatgatatcttccatcttgcagccatgatgagagatcaacccgatcaggtctttgatgaattcattctctttcatattattgtgtacatattctgcaccttcctccggaatatgaaaacagaaccgctcccccttatttgtcacttcaacacttccaagcttcccttcttcatactcagaaaaccggctcaatttttcctgcattcctgtctcatccacatctaactgaaagaaatgattcagagaactcagcggataatacagacgaatcttctccttacggtagcccagcttcgcctgttcttcctttattacatctataatatttttctcaagtcttgcaaaatccatgattttataatccttttcatctgaaatatatttggcttcaaacagtttctattctttttcttccggtcttttattatagaagaacatccatgccgccattgcgagaataatcacatatcccagcacactgtacttgtccggaacctgtccgaaaagaaagtatccgagaatcgtagagaaaataatctgtgaataatcatagatcgatatctctttcgcaggcgcatgataatatgctgcagtaattccaaattgtcctcctgctgccgcaagcccggcaccaagcagtgccagcatctgcgttcctgtcatcggatgatagttaagcagcagatacggaagtgtcacgatgcaggaaaaccctgagaaaaacagaacaacagagcttcctttctgacctctctgaccaagaatccttaccattgcatacgcaataccggcaccgattcctccacatagaccgatcactgacggaaagagttccatatttgtaaaggttggcttaatgataaacaggcttccgataaatgcaacaaaaattgcaattgcctgcgccggttttaatttctctttcaacagaagaaacgaaaataaaataacaaaaaacggagacattttgttcagcatagatgcatccgaaagcaccagatgatctactgcataaaaattacaaagaattcccatcgtgccaaatgttgcacgcaaaaccatataacctaagtttcccttcttgatttcaaatccgtcaccacttcgcacaatcattataaatgcaacaaagaatgcaaccagatttcggaaaaagcttttctgtatggacggcacatctcccgcaagcctgacacaggcacccattaacgcaaatgaaaatgccgacaatataataaagcaaattcctttatttctggaactcatgatttctaaccccttttctcttattacaaaactacaatttcaaacaaatttcatctcctattagtataattttcgtcttacaaactgtcaatccaaaatattgtaactgttcagagccaagcaaaatttcaaaaaaaggtataaaatgcgtagtattttggaggttagctctgaacagttacaaattgtctacagaacaatatcatccatcttttcgaatccattcatggaataagattctatcatatttccgcttacaagatagaatacgtcaccaatatacagtcctctgctgccttcatatccgctcagctgtctgctcatcacttctttgaatccttctgcctcatcatacgtaaacaattgataagttactccatcatgataggtaacaaacccgaacagattcttctgaacatctacaaatacgcctttataattgtatcctacatcagtgccatagctttcttcaatcgtatacttattttcctctgttacattggatggatctgtaacattaaacatcaaaagtttcacaccttctgttgtaaatccatcttcacttacatccatccctatgccaagcagttttccgtctccatatggatgcagatattcggaaaatccaggaatcttaagctctccaagaatcttcggattctttgggtctgaaaggtctaccgagaacaatggatccacctgacggtaagtaacgaaatatcctgtatctcccataaatcttgcggaatagattgtttcatcttttgccagattgtgaatggagccaatgatctccagtttgtcattcagtacataaagtgaatttgtaccaggtaccgcatcctttacattttctgccacagccttctcagtcaccttacttgcatctgatttatccgttgttccgttcttatcatccgtctcatctgcagtctcattcaatggcataatatcatcattcgaataaatttcatcaattgttgtaactaatctaaggtttccttcatactcgtcaatgctgaaagaatcgttcagcattcccttgatcttcgtctgcgcaacaccagcaagctttccgtctgtataagaaatcttgcgaatcagcgttctgctcacatctgaatcttcataataattacttgtaatataaatattattttcgcttacatagcacacatctgaataaccaaagactgccttactgtctgttttttctgacggatcatctaatgaaaatgctgtaatgatcgtatattcatttccttctgcttcctgtggcatataaatattttctgcttcgatagattttccctgcacttccggaatataccacagatctcttgctgtaacattgttttcataaggatggaactgactaagcacatagacatatccatccacaatcctggatgtattatatcctccgctctgttccatgttaccgatctctttcggatttgacgggtcactgatatcatatacctggacatacgtattgttctcataatatccatcataagcttctgaatcctctgaatttcccacctgtcttcctaacgtaccgaacagaactaatttatcatcctgtacataaatgtcttctacatagcgttctgcatcctgttcgatcgaggccagcttttccatggacccattatcaatagctgtgattgtcacaacactccgacacagtgtataaatgttttttccatcggttttgacaatatcggcttcccccacgccgttctcacggacattcgtatccgaataaccccccgtgtcactaacattactgctttctgctgttgctgcgtctgccgaagacgcactttcatacagtccaatggccatactgttgttatcacgtgccatctgcttattatattctttgatacatttttcaatttctttataatctttcgctgttgtaagtgtctgggttgtctctgtctgatctgctgctgatgcgatagtcgctgcatctaatgttttgttgtttcctttgttgatctgcttgattccaactgtcgctccaactatcacacagacacatgccgctgctgcgatcggaacgatacgtttccagttctttttgttctttttcgtttttgatccctgctgcttttcttcctgtcttgcctgaagcattttctgaattgcctccggttccagtgagtccggaagaatcacatcatctgccatctgtctcaaatcctgctctaaacgcttttcatcctcaatcttcttgttgttcttttctctattttcttccatcttttccgcctccttcttctattcttttttcaaacccatctcttataagatcatcctgtacgatcatcctgcttccaacatcttacgcatcttcccaagtgccctgcttttctttgatcgaaccgttgcagcattcatctcaagcatctgcgcaatttcctcacttccatatccagcgaacacagaatacgaaagtatcatacgctcttcttcctcaagccttgcaaatgcttccttcacatcaaaatgctgctcatagtccggttcatgtccagcctctaatgtctcttcctctgatgcatgatttccacgctttcccaacatttttctgcattgatttcctaaaattgtaaaaatccagcttttaaaactactctcattcttgagcttcgcaatattttcaaatgcagatataacggtctcacttaccgcgtcttctgcatcttctgtatgcttcatcatatataatgcgaatttatacatttccttgcaaacgccggcatataacagggaaaatgctttcgtatctccattcttcgccttgcgaaccaattcctctttgaattgtatttcccttgaattttctttatccttcattcgttccctcctctcgaatcatctttttcatttgaagattcttataaccatttttatgaatcacctgtattggttcatgaagtctatgaatagtttcacattatctttattataggttatatacactagagtctacaaatagaaaaactgttgcagatgaaaactaagaatttcttaataaaaagacagcgagatacaggtcttttccatatctcgctgtctttggatgattattcactcctaaagtgttaacatatttttacttcatcaataaggcttttcctattaattctgcacactttttcagttctgcttctgtatggctggacataagcgcgactctaagccttgctgctcctttagcgacagttggataacgtatcgctgatataaaatatccattctcatgaagatagttggaaactgtcagtgcattttcctcatcaccaataataacaggaattatggcagtttcagattttacattgataccatatttcccaagttgtgtacaaaaatattttacattgtactgcaattttgttactcttgagatttccttttcaagaacttcgattccagccagattcgcagccatggttactggcgaaagtgaagtagaaaatatgaatcctcttgccacatttctcagatagtttatcagtcttgtctctccggccacataaccaccttcgccacctatcgacttactaaatgttcccattaaaatatctacctgtcttttttcctgccagtattctcggattccatgaccggttttgccgatcactcctgtggaatgtgcttcatctaccatggaaaacaattgattctcttcacagatatcaagaaattccggaagctttaatatatctccatccatagaaaaaactgcatcactgacaacaatgcctgtctcacatggattctcctgtattttttttcgcagatcatccatatcattatgagcatatgttacaattttggcttttgaaagacggcatccatcaataatacttgcatgatttaattcatcactaaaaacagtatctccttttttcaccattgcggatattgttgctacatttgcaacatatcctgtgttaaacacgatcgctgcttctgtttccttgtaggaagcaatcttattctccagtgcattatgtatcactgtatttccggttgtaagtctggagccaccggagccaaatccatacatagctgtcgattctacgactgctgattttatggaaggatgactggcaatatccaggtagttattggatgccattaatacataatcttttccatctatagttacatgtgaactctgtgctgattctattgtcttcattgtgcgaaaaagatggttttcttttaaagataccagtgctttatcaattttatcccacttctgtggtcttttcatatctgattttttgcaaatctttttgggtatatttctgacgatcacatgctgattctgaagaaaatcaattgctttttgttcttctgcatctgttcctcgaaacagaaatattcttcctcctttttcgctccccattctcttcatcttcgtgattcttctataaccgatttcttttgagctcacataaccggtcacgtactcgggatcatctgaaatacatatctcaccaataataccaggacaatttgccacttttgtcgcaagtacaattgcttcttcataatgattcttctcgtttccgattctgtcccctttcattctctcctgatccatattggtagcacgaatcccacgttttttatccggttctaaacgaatgagcctgtcaacatcaagaagcatagctcctctcatggcataagtttcatctaagaattgcatgacatcttgcggattgtctattccagtttcttttaaatatttttttatctcttcctgccctttttcccatatttcgacctcaattgtctctactgaaagtgcatcaagataaataatgttctccttgcagactttatttatcttcaagttcaacgcatctgcttcacccttggaatgatgcattcctctctctatcagcgcattggcaaatatatcaacatccggtgcctcaacgattttctctgctccggatatgtgtacatccgtaccgttttcctttttgcttgcacgcatcttaatactgtacaattcctccgcactcatagattaaattcctttctgttcagtgaaccagtctttcatgacatcaacaatctgcctgatctcattatcctgtatgatatacggaaacatggcatacataatatcgagaaatggtcttgaaaatactcctcgttgatatgcatactcctgaaatccgataagacatgatgggtcatgtacctggaaacaaagacaacctcccatatatctgatttctttgataagcggatgagtgaatccggagaccagatttctaaccatatcctctatatgcttgattttttccatatagttttcacgctcaaatatttctatagattttaatgctgcactgcatgcgaccggatttcccataaatgtaggaccatgcataagtgcatctgtatccttatcagaatagaatccattatatattttatgatttgctactgtcactgcatgtcctatatacccggcagtcaatgcttttccaagcacgataatatccggaagtacaagatcagacacaaaacgatttccagtacgtccgaaaccagttgcaacttcatcaaatataaaaacaacatcatattcattgcaaagttctcttgcccttctcaggaaatcaatactatacattttcatcccgccggctccctgaagaagtggctctacaataaatgcataaaattcatttccgtgtgtccgaaatactttttccaatgcatccatttccgttggaatgtgaattacatccttcttatcatcttctgataatataaaatgataatcctcatcatctccggccttcatacacataaatgtatctccatgatacgagccggtaagcgaaaggagtttttttcttccgctgccacgattaatattaaattgcaatgccattttcaaggcaacctctacagcaaccgaacccgaatctgaaaaaaaacagtaatcaagatctcccgggagaaaatcttttagtttttctgataatttcaagactggttcatgagtaagcccacccagcatgacatgactgaattgatcaatctgattcttcattgcttcgttaatttctttatttttatagccatgtatcatacaccaccaggaagatacggaatctatcattttattatcctgcgtatacaaataaactccttctgcatctacaattttatatggtgtcttcattttcttcatctgtacatatggataccagatcataagtttatctcctaaaattattcttatttttgctttcctcattccgttatattgttatctgtataatgaaattaattctgctatatcaatattcaagtccacgtctcccatggaaactttcgccagagtcggaagccccgtcatatattcgcacatgcgtatattatcttcatgcatgatattatccgctatataatgattaaaaatcattccttttatattcatatttctgtttttcatatattcataagttagtacaacactattgattgttccaagtcctgcatctgcaaccagaatgcagtcaagttccatctcatctattatatctgtcaacccaatacgtgcctcatcaaaacagatcggacataaaataccgccacttccctcaactgttatatagtcgtatttctcttttacttttctataattatccaaaacaactgccatctcaacatgatttccttccagacgtgaagccagatgcggagaataagcatgctcatagatatacgggcacatttcctctactgactgggagattcctgatacattcttaacccacaaagcgtcaccaggaatcagcgttccatcttcctctctttcatttccactcatagcagctttaaaatagcctggagtcatcccgttctcttttatcttttttataatcaatcctgtaacgtatgttttaccaacatccgtacctgtaccggttacaaatatcccttttcccattgcattctccttttttcttgcatactttaggcaaagtatatacttactcgcaactaattgtcaaccttttttatttaatggttgacaattagttgcttattgtatacaatagctttgcttttaatctctctcaatgggaaatggcagaaatattttaaacaaaaggatgggaaaactatgaatactacagaagaatcaaaagaaagaattttatccaatcatttttttagcgtcaaaaatctgactatggacggcatgtgggttgttctgctgttcatctcgggcttatttaaaatcccatcacccattccaggaactgaatttcaattatcagccccattagccataagcatcggaagaatcagaggatttctacattatcttaccatcggcatcattgccagcattattgggatgatattaggtcttcagactatatacaatgtcattatcgcaatggtgtaccgtattgtagccggtcttatcttaacagtattaaaaaaggacccactggccctcattattgctggtcctgccggaacgtttgcagccagactggtattggcaacaatcttgggtgttgcctggcaacctttagtagtaagcgcagctcctggaatgatttttactgcaataactgcccctgttctgacttcaattctaaaaagagtccttaagacaatttcctaaaacaccaactcaggagcatctattttaacagcgagatacaggtctttcccatatctcgctgtctttagacgattctttgctttagcctgatcctcatagttccaacaaatcttcattcttgcatccaagtgccctgctcaatcgcaacacatcaattgctctggtctgattgatatctctctgtctttgctcaaagagttgtatctgccgcacagatactcctgacagttctgccagttctcgctgtgatagtcccgccaaatcacgaattcgtttcagatttgtctccggataatgttggttccataattcatccaaccgctccacgaaatgtgccaaatccatctcgtggtatacttcatacatatttcgaatttccgtcattgataccgccctgtagatgcgtgaaaatgttcttcctcgataccactgataataggccaatgcccagccactccaatattctggtgatttatccaaatacatctcatctgggtactcttccattactaacccagaatcccgaatcacttctttgactaactcacaccctgtttttccggctacataagtaggatttccaatttcaaattgccgtgacacatttgaaaccagaaacatttcaaaaaatttatcaatatccatatcatatgtgttcactgcgaaatccaacatatctcccaatattcgttgggctgacgtaagataatcatctgaataagcgtgtatcaccattttccataccctccctcatgatgtccagcatgaataactcatgaatatctgcactttcttttttacgtcttctatattctcgtcttgcttcacgctcgcgctccgctttcttgatataatatatttccgcatctacattttcataattctgaaaataaatcgtctcaaaagctttcggactttttaatacaatctgctcgcccaatttacctaaccgcatcgcctcagataatttttccaacgaaattactcccgaaacaaaatcctgggcaaacgaaaagtatgaatcatctgcacgatatcctacaataatatcatatggagtaatatctatcaggaaatgctcttttatgtatttttttgcctcttctgcaatacttccattctgccagtacgttctattatctgcaagaatagcaagccaattcaatatgtggtattttgaatcattcagattcaatacttttaatccttccatgtccaattcataaatattcacatatccatttttttgctttgcacatgcccactctcttgctaattctatattttctgtacaataaaaacctcttccgtaatcattgtgtctggcacccttcccgaactctggtttttcaattaagaattctgatccatgatataatatttttttcataccagctcctccttatgtattaagtatatcgctacagcgatatacttgcaagagattttgagtcagtgtactccttacaggaaactcgcaaaaatatttatgatatcgttttttcaggagataatgcttttacatctgtccggtttattttgtgtgtaacgcacaaagtgaattgactttttttgtacgcaagaataaaataaaagcgttgattttgcattttattgactgtattctgaccggatgctatgatttgtgcgtaaagaacaaatagcaacataacaataatgatgttatttcaaatcattactgttaataagaaaagagatgctgcatggtgttcaggctatccgaacacatattgatgtgacagatccaacatttacgggtcttaaagctgctattttccccttcattttaaattcttcccgtctgtttaaatttctttcatcaaaaattccagacatttcatcgccataaattcatggttaccgaccaggcatattgcatttggcatttccataagctttcttattgtcttaataggatgaggacccctatcaagtacatctcccaaaatgtataaagtatccgtatcttttagatcaatcttatcgagtaattctataaacatgttgtactgtccatgaatatccgaaataacatatgtagacataaaactgtctcccttctatcatctaattcattgcgaataagacaataattctgtcaacgttcgcggttcataattcatccaaggtttcatgcatcctacatttattgctctaacttccgttttatacacatgttgacaatcactttccaccattttcattaaacagctttgataataagcatcctcattactgtcatgcgtatgaccatataataaaaagaatcctttccccattcttttccaactgaaaattggataatggcttaaaacaagattataactctttccattagctgaatcatgaatttctttataatcacaaatttctgcaaaaagctgatgatatctataatccgacacatcatcatgatttcctttcacaagtattttttgtcccttcaatgtagaaatataagcaatcaaatcttcatttttacctctataacttatgtctccaagaatgaataccctgtctccatttgttattttactattccatcgtttcttgatcgtctcgtgcatttcatccagactgtcaaatggtctttcatcaaacttaatcgaattttcatgaaacaaatgtaaatcactgatataataattcattacgcatcgctctccatatcatagttattgcttaaaagcttgtacttttcacatgtgatctaatctgatcgatcgtaagattctctatgttatcttctgcataaaagcaaaattttccatcaatcatctcagcccatggcactttttctccaagaaatttatttaatggaattttatatatttcaggttcttccggatattccaaagccgtacaccttccatcttcgtttataagtttatcataagcctctatcactagtttctcatctgtataaatccccataatactaagttccccatagggctatattattcctatcaaatatacataatttccattatttcgccctacataatctcatcatactcttcaaacataatccggactccaccttcttcacattccacatgataatgtcctgcataccactctgttgtagtttcatattcatagcaaaaatcttcaatacgatcaaagctccgatgtgtatcacctgtaatataaaaatgcacctatccttcctccctctcaattttcacaatttcatccatccattcctctgtcggcagatttattttctacttgactttttactttgtcatctagttgttcgtccggaaaccatggaagacctgttataagtcggtattctttatcctggctatatgccccacctattgcaatcgcctttttcccatcaaaatcataaatttctccgtcttttgcaaataatatattcggatattccggctcataatatacctctcctccacgcctgatttgtgttctgtaagtttgtatatgataaggtctttcctcatgatttccatgaatacacaggaaataatttggaaaatccgcaagtttttttttgttttcccgatctttgtcagctccaaaatagtttaatccgacatcccccaataaaatgatcacatcctcttttccaagttttttattaaatctcgccaaccagattaacttatcaaaatgtgcatgacaatctcctgttatgtaataacccatttcctaccaccttacatatatcattcatcttctgttctatgcttaaaattgtaaaccgccttcaaaatctcaattatatttatctgtaatttccattctcatttatagcgttttgaatatatagattcatttcgtttcttatttgttccatctgttttccagtatctggatttgtatacggaatccttcctataattttatccacataatggttatctcttatactttcatatgtcgctttaaaatttatatcataaaaatatgcaagataagatatccaataatccatctttgtctttcttgtctctaatagaactgatttatgatttttgaattgccgcataacttctggcgtaatttctgacattcctacctgttctgcagtaactcccatgagaatatcaattgctgtttcgagcttcactctgcaattgtcaagtttatctgcatcacgtatgatttgagcatgcatcaattctcgctcattcgtaattccttttaagcagtaatcactatgatgtcctattgctgtttttataatttcatcccacttattttcttcgacaaaacgccgaatcagtctctcctcaaataaaattctcacaccgaatgctgcatgatccatcgttcccggttcaaaactgttgtaacatttcaattgttcaaatcttccaatatcatgtaacaatccaataatctgagcgagctcacaatcttctgcggacagtttcatatcttctgtaatttttttactgcattccatcactccataagtatgcacaatcttcaactttatcttttcatttttttggtcataatcattcaaatagttttcaaaagctttcttcgcatattgtaaatcaatcatttcgttttcccaccttattttcaagatttttcaacataatattcccgtcctgtatctagacaaactgcatttacagaatcatccaatccatcatgaaagttaccctctggctcgatttcagctccaggcgtagatttcatattcgcactctcccagccagtcaatcatatgaatcagtgctgcattcgacttcggagccattttcacctgactgttttttatataaaaaggttgttctaaagcacatttgcaccaaaaggcataaaagacaaacgtgccattttaaagaattgttttccaaacgggattcctacaatcgtgatacaccacatacatcctaagacaatatttccaagagccattccccatccaaagaaaacaatccaaattaaattcacaagaaatgagaaggttccattcccatatacaacctcttttccaaaaggccaaaatgctaaggatgcaaatttgaaacattgcaaacctataggaattccaacaattgtgacacaccatatacatcctgcaatgatccatgcaagacctccgattatcccgccacaaagaaaccaaagtatatttcctaataatttcatctaatccactcccctgttactccacaattacggtagccttaacacatatattccactgattttccatataaaatctgtcttgataaactttaatcacccctggtacagcgacttcttcaacgggttctttcccaaaccgtctgcgtgcaatcacgtctatgattacatcgtcttctttcgccaaccttttaagttcatttaaatacacttgatatagctctgaatctataacgcagcatctcactatatattgttttactattttcctaaagaccctgccaacatcaagttccttcatttcgcctttgatcttgatatattctgcttttttaccaaactattgaatagctgtagaattagtatatcataagcaacgacatatagtgcatcttattatgtaaatcgcaaatccaacccagcaaatagttctccaagcgtactgctcaagcgctctgacggtttatccggcatttcgtaacttaccaattgatactctggattcaattccaatttttctattagatatcctgtattaacagcatcatccaatccgtcatggaagttaccttccggttcaatctcaactcgtcccagagcttcttccagcttaggagcatttttaacctggctgttctttatacctgtcagattctctataaaataatcaatcacaccatgttctggatgaacacatttttcgttatctccatctccttcttttcatttttgaggctctttttacaaaccttacatattgttcctactggtgttaccaactcaacttttgcataagcgctctttccgatcttgtcatataaacgaccagcactcatacgccgaacaatataattacttatagatcatgcaatataccaagtaaacaattcccgccactactaatcctggtaaaaacatttcgttttctcccttcggactaatcattcatgtactcatagtaatcagattcactggcaaataaaatatatctgccttctaccaatcccatgtatccatcacttgtattaaatcccttcattgccagttcctccattcctcaaaatctgttcatttattttatttgataggtatagtctaaatctggaactgtgcaataaaaatccctgtttattctataaaaggacagatcctattatccaaacctgtccctttgctctcttattttgtttatacatctccgttcatagcaacggatttacaaactgtggcatttgataatcctcataaggatcatcttttcctaaaaatatattgctttgctccaacatatcattaatcaacttcttttcaactgataaaacatctaaatcaggaaattgatacaatagatacgcactgaattcgcggataaaatcacaatagtcttttgtgaattgaatcgtgtctttcgttctctctcctgcatatgatccggaaaaccttcgcaaagtataaactctccaatgctgtaattccacaaatcatttaccatatatgtattatccataacttgctctctgtatccactttccaccgaaattctgttatataaattttgaagcctacggatttttgaagctaatgttacctctaaatgattcatcgaaccaaacattcccgggctgctatgccctacctttttcccatgtgaatcataatgatttacagatccaaaccagcttctgctactgtaacctttcttttccatagaaattctcctttcaacttcttaaatgaactttgtactattaatagtttctaacactttccttttgatatttcaattctaatagagatgcagactatttattctataatcaaaagagaccgtacttgggttgatattgatgttttatcaactaatcacaatcttcattgtacactttaaccaatttcccatctcttatttatcttttttgacgtttttattaattttcccttgacacaccactaaatccattatatattacatcatagaaattgacttgtataagttcatgataggatgagcgtgtctaccaactgccgtaacagttgactacaagtttttgggaaaccaaaaatttgcagtcagttgtcacggcagttttttatttgtcataaatatcctgtcatccatttatcaattcccatattttcgccggcggttagaattgaacttcttatacatttcgcgagatttctgtcattatttcaacagttatatctttgttattaacaaagaataaaacaaatacaggaggttgtaatatgagcagcttattaattaaaaatgcggatgcaattgttacctgtgacagccaggacgctgttttagaacatgccaatcttttgatgcaagacggcatcattacatacatcggaatagaaccgcagaccgcagacgaagtcattgacggaacgggatgtctcgtttatccaggactaatcaatactcaccaccatctttaccagacgttcagccgaaatcttccgcaagttcagaacatggaattgttcgactggcttacaacattgtacgagatttggaaaaatctgaatcaggatacgatttaccacagctccttaacaggaatgggtgaactattaaaatccggatgtacaacttgttttgaccatcactatgtatttccgggcggtaattccgatgcgcttctggacgcacagttttctgctgcaagagagctcggggttcgtatgtacgcttcccgcggaagcatggatctgagcaagaaagacggtgggcttccgcctgacagtgtggtacagaacgtggataagatcttgaaagattctcagaaatccgtagagaaataccacaatcctgctccaaattccatggaaatggttgctctagctccatgctctccgttcagtgcaagcgaagaactgtatcgtcagtcagcaatccttgcgagagatttgggcgtacgcctccacacacatttatgcgaaacaattgatgaagagaattatgttcttgagaaatacggcaaacgaccgcttgcctatatggaagacatgaactgggttggaaatgatgtctggtatgcacatggaattcattttaatgatgaggaactgaatcttctggcacagaccggaaccggcgtagctcactgcccaatttccaacatgaaactttcttccggtatctgtcggataccggatatgttaaaactaggtgtaccggttggtcttgcagtagacggaagcgcaagcaatgacggttctaacctgttagaggaacttcgtgtagcgttcctgttgcacagactgaactcaagcaagcttgctccgagtggatatgatcttctgaagattgccacaaacggcagcgctaaaatcctcggcagaaacgatatcggttctctctcaatcggcaaagctggagacttattcatgattcggagaaatcgtcttgagcttgtaggggccgacctggatgtaaaatccatgctcggcacagtcggcttcaagggcactgttgattatacgattgtcaatggaaaaatcgtagtaaaagaaggtcagctaacaggaattgacgaagaaaaggctatatacaactgtcgtcaagaagtcaacaaatatttgaatcattaaactctccatccagatgcagtggcacagcttccatccgtattgaagttcgtattcagtgatgcagtaactggaatctgtatcgtagcgattatcgccaacttactcttcccaatgaaagatgctgctgatattgcaaaagcaaaagaagctatgatgggttaaatctatttccctttatttacctatgggtgccgtaatgcggcacccataaattatctgtatatccaccgttgctctccacaaggctcttgcttgatctagttttccttgatcctcgttttccggacatattttatatataattctcatattcatttcaggatccatattgcctccctgacattaaccttttatctgcttagctgtctctatcaacttaaccaaattttccttcaactcattttctgaagtatctggtccccaactgattcgaacagagcactcaatttcttcctctggaatttccattgcttttaatacatagcttggtgaatagtttttagatgtacacgcggagccatttgatatactacaaagttattggttttttatgataagtcattttcatcaaacactccggtaaagatccagttctcaccttgatcttcagatgtgaatacaagcccttctgtctcgccactctgcgtcatcacatgaatcgtgtaattctctccatcctgctgtggcatttccagatactgataatcttcaagcgtgaagccatattcctgcatatgcagcggatattctgtcacagtatccatcggaagttctatctccttcagtgtctttccaccgtcttttgtaacataaatagatgaatgtgtctgcgatgccccactcagaccgatgaatccaaactgctcgtcgaagaattgtatcccttctcctactccaccatttccgtcaaatggatcttcatttactgttgtccagttatacccaccatctgacgtagtttccagtttgtaataacgtgttccaagagccgcatcaacaactgaaagtttccagcctttctgttcgtttaagaagaatcggacaactccgcttccgtccgtatcaaccgtccaggtattattctcttttccctgttcttttgcctgcgaatctttctctgcctgctcattctggctaatcgtatcaggactgatatattctggttccatcatgtaacgcaccggagtcacagattcatcctgcggaagatacagagacacttcatatccaagtgcttctccgccgctatccagtgctgtgaaatcagtcatgccgccgacttctccgtcaccatccacatctcccggaagataaacaagaccttccgaagaggcgaaggagcgttttccataatacagaatctcatattctggcggattatctgcaaatgcataatccagattccattgtgtcacctgcatcttacaatctgatttttccagaatggtaaacataggatctaatttcttgtcatcatcataatctgcatttgcataacctgcaatctgcacaacaatcttatcacttttatctatatcataatcaatcagataggtcttgtcttttcccttttcattctgtccataaagatatgctgatacgcgggttatcgttccgtctttatcaaaggacatctcaaaactatctgtgatatataactcgtccggaagtttcaatttcttattgacatcttttatcagcccttctgcgccatcacgaaagaagttgttatgttcatactcaattttctttgtcttaaacaggctgtctaccttccaggacaatgcgccattataaggaatcgcagtatatacgatataagaaatacatccaaccgtaactacaagtagaatcaaaagttctgtaccaaacactgttttcctgagtgcgcctttcatttttaaaggattttccttttctgctatcaggcaaccgatccagatacaaagactgagtaccagaaggatacctaaagccaaaaatgcaaacttcagctgtctgatgcttccgtacttgcaaagtacacaggtcacgagcaaaaacaaaatgtaatagagaatactaagcttgccaaatataaattccagttgatatttcacatattttaggaaatttaataactgttatatttgattatcaaattcttcgcaaacccttgaaaatactaagtttgtagcaagtgaactttcccttactctttcccttgtgttacattctcccattggtttttatgaaccttaatatgggaaaaattaagggaaagaaaatttcataacacaatataacatataacaataacgacatggtgaactgattgaaatgttttcgatatttaactttataactgattatcaaaagaaaatggagataagatacgatgagaacaatttatgcagaatacaacataaaccacgatagtattgatgtttacacaagtgccggatatatgcttcgcattgattgctgggaagctgaaaaaaatttaaaaaccacatatggatcagaatgtgcgcttacttcattggctgtggatgagcctttggaatatgcaagattatatcttgatggcaatttacagatgtgggtggatgcagaagattcattagaactttattaagcaagaagtgaaatattgttgtagatctatctcatttcttgagggttcttaagatgcaagatgattgctaatacgcattttacaatagagtttaatttttaaaactgtatggtggaaagcaagtctgaaatggcttgctttttgctttacaacgagggtggttactgtataatgaaatatgaagtaaaaagcagtaatttgatatgaagcaataaaggaaatacatgatggaaaaatataaaattctaatagttgaagatgatgttgatttgagagagggactttccttctccttttctggtgatggatatgatgtgacagagacagggacaaaaaaggatggtttacaagaaatcgcaaacggtggttatgatattgtatttttggattgtaacctgccggacggaacgggctttgaactctgtaaagaagttcgtagctacagcaatatcccaatcattatgctgactgctcgtgatacagaaatggatgagataaaggctttagaattaggggtaaatgattacttgtcaaaaccattttctctgggtgtattaaaagcaagaatgaagcggatacttcaagaaaaatctgaaagtacaaagattgttacaggttcattaagcatagaccagagtacttgtaaagtatataaaagaggttcagaaatctctcttagcaaattggaataccgtctgttggtgtatttgattgaaaataagaatcatatcctttctaaggagcagattttagagaagatatgggatagtgatggaaaatatgtagataacaatacggtgtctgtgaatatcagcaggcttcgtacaaagatagaggatgatgtatcgaaaccaaaatggattcaaacagttcatggaatcggatatatctggaaggaataaagagatgtggattacgatacttttagcagtgcttttgtgtttgtcgattggatatagcatatatcaaaaaagaaaaacatatcgcctgattgaccgtttgctggacagtgtgttaaatcgggaaatgattgcagcttctgatgtggaagaaggagaatattctgcccttgtcagtaaaatcaagcagatacaggaagtgcttgataatcacgtgaatagtgccgaacaagaaaaagagcaggtgaaaagtctggtatctaatatgtctcatcaattaaaaacgcccttagcgaatatttctctctatgcagaaatcttaagtaaagaggaaattacatcagaacggaaaacattgttttctgaaaaaatgcaacgacagattgacaagctgagttggattgtggagtctttatcgaagatggtaaaattggagcaaaatattgatggctttgaaggaaaagcaatagggatcaagcagacgattttagacgcagtagatacgctttatgagaaactggaaaaaaaggaaatcaactttacattggaaccatttgaggacagattactgtatcataatcgaaaatggacagcagaagtatttgtaaatttgttggaaaatgctgttaagtacaccgatagaggaggaactatttccatttgtgtaaaaagttatgatttatacacagagattcagattgcagataatgggcgtggtatccggcaggaggaaatgaccgatatattcaaacgattttatagaagcccagaagttgagaatatggaaggttctgggattggtttgtatctttctaatctgattttggaaaaagaaaaaggatatatgacggtagattccgagtatggaaagggaagctgtttttctgtgttcttacaaaactgtaagaactaatcatccgtttgtaaagaaattgcaagatacggcagttatactggatgtatcaagaaaagaggagtgatgacggatgagtattttagaattacgaaatgttgagaaaatatatggagaaaaagataatcaggtaaaggcactacggaatatcaatctaaaagtagaagaaggcgagtttgttgccattgtaggcacatctggttcaggcaaatctacttgtcttaatttaatcggtggtctggataatccgacaagtggacagatttttataaagaataaagagattggttctctttcaagaaaagaactgacgattttccgtagaagaaatatagggtttgtattccagaattatagtttaatgcctgtgttgaatgtgtatgataacgtggcattgccggttacatttgactgtggaaaacatattaaccgcaaatatatcgaagaattgttgcgggaactgggcatttgggagaaacgcaagaaatatccaaacgaattatccggcggtcagcagcaaagagttgcaatcgccagagctttggcaaataaaccgagtatcctgctttgcgatgaaccgacaggtaatttggactcagccacaaccattgaggttatggggttattaaaaacgagttgtcgtaagtacaatcagacgattctcatggtaacgcataatgaagccattgcacagacttgcgacagagtaattcatattgaagatggtcagattgttacaggaaagagaagatttccggcaaaaggcggtgatgtcgtatgttaaagctggcatggaaatatatgcggtattacaagagccagacatttgcaatttttgcgagtattttattaacagcatcattgctttccgggatttcttctttgatttacagcagtcagaaaagtgatctggcgaacagcaaaactatttacggagactggcattattatattgaaacggataaggaactttttaattctgtagaaagcggtgagaaaggaaaaggatatacgctggaacagtgtggaaaaatggaaatccgtgacgttgtggcagaagaatttatgatctgttttatccatgccgatgaaacttatcgtcaaatggcacacagagacttgttggaaggaacattccctgagaaagaaaatgaaattgcagcggatggatttgtgcttagtaatcttggattttcagggaatttaggagattcccttcgcattggtgaaaaagagtatattgttactggtgttctgaaaagcgaatgggcggcaagttccagtgaaatggaagtttttgtaagtgattcttttaaaggtcgaggaagccagacgtttttatatctcagttttaatgaagatgagaagttatataaacagttggatgcttttttacaggaacataaattatcttctgaatcggtagcagaaaatgatgaagtaatacagtatcttggcggagaagcaccaagcagcatttctgaaatcgtgaaatttggtctgtttgaagaagaaggaaacttcacttatatcgttttgaaattgcagagcgactacaatctggcttacaacggaatgattttcctgttatgtctgttcagtcttttcgtagtttacagcgtattcagtatttctgtatcgaagagaacttctgagtacggaatattacagacattaggtatcagtgaagcgcagattggtggcaccttacttttggaactttggacgttatttttcattggatatccgttaggatgtcttttaggaaatggtgttttaagccttatgtatcagaaatttagcggtgtatttggtggaaaaggaatcagtggagcagggaatggtctttctgttgcggaccatacgttagcagaaggagaaaatacagtagagttttttgtttcaaaggaagctgttgtgtttggttttgtatttctactgatttcgttagcactcgttgcctttctcgtggttcgttccatgcggaaagattcgctgaaaactgtgatgagtggagatacttcttttgtaaaaagaagaaaaatatacgctatgcgaaatgttaatatggcaaatgtagtggtgcggaaattcatgtttgccaataaacgaaaggtaatagggattttattatccttgtctatcggcggttgcattttcttatgtaccacctatatggtagaaaatttgaaggttcacgcagaactttcgctgatatcggatgatgggcttggttctgagtaccgtatttctttaaaatctgactcgctgaaggatacgattccggaggcggtagcagataagattaaaaacatgccggaaacagagaatgtatatgcgacaaagtatacgatgggggaattacagatttccaaaaacgaatttttgtcagaagaagaatggagtgactatttcaaatatcaaaatcaggagccgtattatatccagagatatgatgggatctgtaagcagcaggaagatggaaattatcggattaaatataatgtgtacggttacgatgaagcgatgatagaacagcttcgggattttattctggagggagagattcagccggaaacaataaagaataataatcaagtgattgtgacggcgaatatggacggtcagggaaattactttttttatggaaagaagccgggcgataccattactcttcgagtaccaaagacagaaaactatacagatgaactgttaaaattccaaagtggcgaagaaaactatattgaaaaagagtttgagattgcggcaatcgtaaacagaccgttggcgcaggagaaagattttctgaatacagaagtctggaaaaatgcgcagagtgtgattatgacaggcgaacagatggaagaaaactttggaattacagattatagttttatcaatgcatcgccggctgatagtgcggatgcaaagatcgtgagcaatcagttattacaagtaatccgagatgttcccaaggcagtattgcaggattatacgaccgcaattgcaacacagaaaggttatcttggacagcagcagatcttcttttccagtattgcagtgattctgctgattatcagcctgttccatatcgtaaacagcatgagtcatacgattctgaccagaagaagagagtacgggattatcagagcaatagggattacggacggcggattttacaagatgattttacagacaggtattctgtatggattgttggcggatgtatttatctatcttatttataacagagttcttcgcagagtgatgaattattatctggctcatgtgctgcagtttttacattatactactaatattccgaatctggttctgaatggaattatggtgctgaatgtagtgattgcagtagtggcagtaatgtttccggcttggaagatgggaaaagagaatatcataagtgagattagaagatagatttataatcaggatttttagaatttctttagtggttagtatcattggatatagcaatagaattagagagaatacccaatctttataagtaaccagagggcgacagtaaaatactgccgccctttcttttatcggtttgtccagtaaagagtgttcagataacaccggattccaagatatattccctgtataaataataaaagaaacaaaagatttatgggcattacttttttgatt
